(19) United States
(12) Patent Application Publication
(10) Pub. No.: US 2019/0100762 A1
(43) Pub. Date: Apr. 4, 2019

(54) NOVEL CAS9 SYSTEMS AND METHODS OF USE

(71) Applicant: PIONEER HI-BRED INTERNATIONAL, INC., JOHNSTON, IA (US)

(72) Inventors: ANDREW MARK CIGAN, MADISON, WI (US); MATTHEW G. KING, JOHNSTON, IA (US); HAINING LIN, CLIVE, IA (US); JOSHUA K. YOUNG, JOHNSTON, IA (US)

(73) Assignee: PIONEER HI-BRED INTERNATIONAL, INC., JOHNSTON, IA (US)

(21) Appl. No.: 16/083,191

(22) PCT Filed: Feb. 27, 2017
(86) PCT No.: PCT/US17/19640

§ 371 Date: Sep. 7, 2018

Related U.S. Application Data
(60) Provisional application No. 62/306,904, filed on Mar. 11, 2016.

(51) Int. Cl. C12N 15/82; C12N 15/113; C12N 9/22

(52) U.S. Cl. CPC C12N 15/8213; C12N 15/113; C12N 2310/20; C12N 9/22; C12N 15/8216; C12N 15/821

(57) ABSTRACT

Compositions and methods are provided for novel Cas9 systems, including, but not limiting to, novel guide polynucleotide/Cas9 endonucleases complexes, single or dual guide RNAs, guide RNA elements, and Cas9 endonucleases. The present disclosure also describes methods for genome modification of a target sequence in the genome of a cell, for gene editing, and for inserting a polynucleotide of interest into the genome of a cell. Also provided are nucleic acid constructs and cells having an altered target site or altered polynucleotide of interest produced by the methods described herein.

### CROSS-REFERENCE TO RELATED APPLICATIONS

[0001] This application is a 371 national stage entry of International Application No. PCT/US17/155717 filed 27 Feb. 2017, which claims the benefit of U.S. Provisional Application No. 62/306904, filed Mar. 11, 2016, which is incorporated herein in its entirety by reference.

### FIELD

[0002] The disclosure relates to the field of plant molecular biology, in particular, to compositions for novel guided Cas9 endonuclease systems and compositions and methods for altering the genome of a cell.

### REFERENCE TO SEQUENCE LISTING SUBMITTED ELECTRONICALLY

[0003] The official copy of the sequence listing is submitted electronically via EFS-Web as an ASCII formatted sequence listing with a file named 20170223_BB2398PCT_ST25.txt created on Feb. 23, 2017 and having a size of 605 kilobytes and is filed concurrently with the specification. The sequence listing contained in this ASCII formatted document is part of the specification and is herein incorporated by reference in its entirety.

### BACKGROUND

[0004] Recombinant DNA technology has made it possible to modify (edit) specific endogenous chromosomal sequences and/or insert DNA sequences at targeted genomic locations thus altering the organism's phenotype. Site-specific integration techniques, which employ site-specific recombination systems, as well as other types of recombination technologies, have been used to generate targeted insertions of genes of interest in a variety of organism. Genome-editing techniques such as designer zinc finger nucleases (ZFNs) or transcription activator-like effector nucleases (TALENs), or homing meganucleases, are available for producing targeted genome perturbations, but these systems tends to have a low specificity and employ designed nucleases that need to be redesigned for each target site, which renders them costly and time-consuming to prepare.

[0005] Although several approaches have been developed to target a specific site for modification in the genome of an organism, there still remains a need for new genome engineering technologies that are affordable, easy to set up, scalable, and amenable to targeting multiple positions within the genome of an organism.

### BRIEF SUMMARY

[0006] Compositions and methods are provided for novel Cas9 systems and elements comprising such systems, including, but not limiting to, novel guide polynucleotide/Cas9 endonucleases complexes, single guide RNAs, guide RNA elements, and Cas9 endonucleases.

[0007] In one embodiment of the disclosure, the guide RNA is a single guide RNA capable of forming a guide RNA/Cas9 endonuclease complex, wherein said guide RNA/Cas9 endonuclease complex can recognize, bind to, and optionally nick or cleave a target sequence, wherein said single guide RNA is selected from the group consisting of SEQ ID NOs: 185-207, a functional fragment of SEQ ID NOs: 185-207, and a functional variant of SEQ ID NOs: 185-207.

[0008] In one embodiment of the disclosure, the guide RNA is single guide RNA capable of forming a guide RNA/Cas9 endonuclease complex, wherein said guide RNA/Cas9 endonuclease complex can recognize, bind to, and optionally nick or cleave a target sequence, wherein said single guide RNA comprises a chimeric non-naturally occurring crRNA linked to a tracrRNA, wherein said tracrRNA comprises a nucleotide sequence selected from the group consisting of SEQ ID NOs: 139-184, a functional fragment of SEQ ID NOs: 139-184, and a functional variant of SEQ ID NOs: 139-184.

[0009] In one embodiment of the disclosure, the guide RNA is a single guide RNA capable of forming a guide RNA/Cas9 endonuclease complex, wherein said guide RNA/Cas9 endonuclease complex can recognize, bind to, and optionally nick or cleave a target sequence, wherein said single guide RNA comprises a chimeric non-naturally occurring crRNA linked to a tracrRNA, wherein said chimeric non-naturally occurring crRNA comprises a nucleotide sequence selected from the group consisting of SEQ ID NOs: 116-138, a functional fragment of SEQ ID NOs: 116-138, and a functional variant of SEQ ID NOs: 116-138.

[0010] The guide RNA can also be a dual molecule comprising a chimeric non-naturally occurring crRNA linked to a tracrRNA, wherein said chimeric non-naturally occurring crRNA comprises a nucleotide sequence selected from the group consisting of SEQ ID NOs: 116-138, a functional fragment of SEQ ID NOs: 116-138, and a functional variant of SEQ ID NOs: 116-138, and/or wherein said tracrRNA comprises a nucleotide sequence selected from the group consisting of SEQ ID NOs: 139-184, a functional fragment of SEQ ID NOs: 139-184, and a functional variant of SEQ ID NOs: 139-184.

[0011] In one embodiment of the disclosure, the guide RNA/Cas9 endonuclease complex is a guide RNA/Cas9 endonuclease complex comprising at least one guide RNA and a Cas9 endonuclease, wherein said Cas9 endonuclease is encoded by a DNA sequence selected from the group consisting of SEQ ID NOs: 24-46, wherein said guide RNA/Cas9 endonuclease complex is capable of recognizing, binding to, and optionally nicking or cleaving all or part of a target sequence.

[0012] In one embodiment of the disclosure, the method is a method for modifying a target site in the genome of a cell, the method comprising introducing into said cell at least one guide RNA and at least one Cas9 endonuclease selected from the group consisting of SEQ ID NOs: 47-69, a functional fragment of SEQ ID NOs: 47-69, and a functional variant of SEQ ID NOs: 47-69, wherein said guide RNA and Cas9 endonuclease can form a complex that is capable of recognizing, binding to, and optionally nicking or cleaving all or part of said target site. The method can further comprise identifying at least one cell that has a modification at said target, wherein the modification at said target site is selected from the group consisting of (i) a replacement of at least one nucleotide, (ii) a deletion of at least one nucleotide, (iii) an insertion of at least one nucleotide, and (iv) any combination of (i)-(iii).

[0013] In one embodiment of the disclosure, the method is a method for editing a nucleotide sequence in the genome of a cell, the method comprising introducing into said cell a polynucleotide modification template, at least one guide RNA and at least one Cas9 endonuclease selected from the group consisting of SEQ ID NOs: 47-69, a functional fragment of SEQ ID NOs: 47-69, and a functional variant of SEQ ID NOs: 47-69, wherein said polynucleotide modification template comprises at least one nucleotide modification of said nucleotide sequence, wherein said guide RNA and Cas9 endonuclease can form a complex that is capable of recognizing, binding to, and optionally nicking or cleaving all or part of said target site.

[0014] In one embodiment of the disclosure, the method is a method for modifying a target site in the genome of a cell, the method comprising introducing into said cell at least one guide RNA, at least one donor DNA, and at least one Cas9 endonuclease selected from the group consisting of SEQ ID NOs: 47-69, a functional fragment of SEQ ID NOs: 47-69, and a functional variant of SEQ ID NOs: 47-69, wherein said at least one guide RNA and at least one Cas9 endonuclease can form a complex that is capable of recognizing, binding to, and optionally nicking or cleaving all or part of said target site, wherein said donor DNA comprises a polynucleotide of interest.

[0015] Also provided are nucleic acid constructs, plants, plant cells, explants, seeds and grain having an altered target site or altered polynucleotide of interest produced by the methods described herein. Additional embodiments of the methods and compositions of the present disclosure are shown herein.

### BRIEF DESCRIPTION OF THE DRAWINGS AND THE SEQUENCE LISTING

[0016] The disclosure can be more fully understood from the following detailed description and the accompanying drawings and Sequence Listing, which form a part of this application. The sequence descriptions and sequence listing attached hereto comply with the rules governing nucleotide and amino acid sequence disclosures in patent applications as set forth in 37 C.F.R. §§ 1.821-1.825. The sequence descriptions contain the three letter codes for amino acids as defined in 37 C.F.R. §§ 1.821-1.825, which are incorporated herein by reference.

### FIGURES

[0017] FIG. 1 shows a diagram of a genomic DNA region from Bacillus cereus representing a CRISPR-Cas locus (referred to as Locus 6) described herein. Arrows indicate the transcriptional directional of the anti-repeat and the CRISPR repeats within the CRISPR array (CRISPR array). Cas9 Gene ORF refers to the open reading frame of the Cas9 endonuclease. Cas1 and Cas2 refer to the open reading frame of the Cas1 and Cas2 protein, respectively.

[0018] FIG. 2 shows a diagram of a genomic DNA region from Brevibacillus laterosporus representing a CRISPR-Cas locus (referred to as Locus 7) described herein.

[0019] FIG. 3 shows a diagram of a genomic DNA region from Bacillus species representing a CRISPR-Cas locus (referred to as Locus 8) described herein.

[0020] FIG. 4 shows a diagram of a genomic DNA region from Bacillus cereus representing a CRISPR-Cas locus (referred to as Locus 9) described herein.

[0021] FIG. 5 shows a diagram of a genomic DNA region from Lactobacillus fermentum representing a CRISPR-Cas locus (referred to as Locus 10) described herein. Arrows indicate the transcriptional directional of the anti-repeat and the CRISPR repeat within the CRISPR array. Cas9 Gene ORF refers to the open reading frame of the Cas9 endonuclease. Cas1, Cas2, Csn2 refer to the open reading frame of the Cas1, Cas2 and Csn2 protein, respectively.

[0022] FIG. 6 shows a diagram of a genomic DNA region from Enterococcus faecalis representing a CRISPR-Cas locus (referred to as Locus 11) described herein.

[0023] FIG. 7 shows a diagram of a genomic DNA region from Bacillus cereus representing a CRISPR-Cas locus (referred to as Locus 12) described herein.

[0024] FIG. 8 shows a diagram of a genomic DNA region from Enterococcus faecalis representing a CRISPR-Cas locus (referred to as Locus 13) described herein.

[0025] FIG. 9 shows a diagram of a genomic DNA region from an unknown organism representing a CRISPR-Cas locus (referred to as Locus 14) described herein.

[0026] FIG. 10 shows a diagram of a genomic DNA region from Enterococcus faecalis representing a CRISPR-Cas locus (referred to as Locus 15) described herein. Arrows indicate the transcriptional directional of the anti-repeat and the CRISPR repeats within the CRISPR array (CRISPR array). Cas9 Gene ORF refers to the open reading frame of the Cas9 endonuclease. Cas1, Cas2 and Cas7-Like protein refer to the open reading frame of the Cas1, Cas2 and Cas7-Like protein, respectively.

[0027] FIG. 11 shows a diagram of a genomic DNA region from metagenomic material representing a CRISPR-Cas locus (referred to as Locus 16) described herein.

[0028] FIG. 12 shows a diagram of a genomic DNA region from Chryseobacterium species representing a CRISPR-Cas locus (referred to as Locus 17) described herein.

[0029] FIG. 13 shows a diagram of a genomic DNA region from metagenomic material representing a CRISPR-Cas locus (referred to as Locus 18) described herein.

[0030] FIG. 14 shows a diagram of a genomic DNA region from metagenomic material representing a CRISPR-Cas locus (referred to as Locus 19) described herein.

[0031] FIG. 15 shows a diagram of a genomic DNA region from an unknown organism representing a CRISPR-Cas locus (referred to as Locus 20) described herein.

[0032] FIG. 16 shows a diagram of a genomic DNA region from metagenomic material representing a CRISPR-Cas locus (referred to as Locus 21) described herein.

[0033] FIG. 17 shows a diagram of a genomic DNA region from metagenomic material representing a CRISPR-Cas locus (referred to as Locus 22) described herein.

[0034] FIG. 18 shows a diagram of a genomic DNA region from metagenomic material representing a CRISPR-Cas locus (referred to as Locus 23) described herein.

[0035] FIG. 19 shows a diagram of a genomic DNA region from metagenomic material representing a CRISPR-Cas locus (referred to as Locus 24) described herein.

[0036] FIG. 20 shows a diagram of a genomic DNA region from metagenomic material representing a CRISPR-Cas locus (referred to as Locus 25) described herein.

[0037] FIG. 21 shows a diagram of a genomic DNA region from metagenomic material representing a CRISPR-Cas locus (referred to as Locus 26) described herein.

[0038] FIG. 22 shows a diagram of a genomic DNA region from metagenomic material representing a CRISPR-Cas locus (referred to as Locus 27) described herein.

[0039] FIG. 23 shows a diagram of a genomic DNA region from metagenomic material representing a CRISPR-Cas locus (referred to as Locus 28) described herein.

### SEQUENCES

TABLE 1
Summary of Nucleic Acid and Protein SEQ ID Numbers

| | Nucleic acid | Protein |
|---|---|---|
| Description | SEQ ID NO: | SEQ ID NO: |
| Locus 6 | 1 | |
| Locus 7 | 2 | |
| Locus 8 | 3 | |
| Locus 9 | 4 | |
| Locus 10 | 5 | |
| Locus 11 | 6 | |
| Locus 12 | 7 | |
| Locus 13 | 8 | |
| Locus 14 | 9 | |
| Locus 15 | 10 | |
| Locus 16 | 11 | |
| Locus 17 | 12 | |
| Locus 18 | 13 | |
| Locus 19 | 14 | |
| Locus 20 | 15 | |
| Locus 21 | 16 | |
| Locus 22 | 17 | |
| Locus 23 | 18 | |
| Locus 24 | 19 | |
| Locus 25 | 20 | |
| Locus 26 | 21 | |
| Locus 27 | 22 | |
| Locus 28 | 23 | |
| Cas9 endonuclease from Locus 6 | 24-46 | 47-69 |
| to Locus 28, respectively | | |
| CRISPR repeat consensus from | 70-92 | |
| Locus 6 to Locus 28, respectively | | |
| Anti-Repeat from Locus 6 to | 93-115 | |
| Locus 28, respectively | | |
| sgRNA repeat region | 116-138 | |
| (Locus 6 to Locus 28, respectively) | | |
| sgRNA anti Repeat region | 139-161 | |
| (Locus 6 to Locus 28, respectively) | | |
| 3′ tracrRNA in gRNA | 162-184 | |
| (Locus 6 to Locus 28, respectively) | | |
| sgRNAs | 185-207 | |

### DETAILED DESCRIPTION

[0041] Compositions are provided for novel Cas9 systems and elements comprising such systems, including, but not limiting to, novel guide polynucleotide/Cas9 endonucleases complexes, single guide RNAs, guide RNA elements, and Cas9 endonucleases. The present disclosure further includes compositions and methods for genome modification of a target sequence in the genome of a cell, for gene editing, and for inserting a polynucleotide of interest into the genome of a cell.

[0042] CRISPR (clustered regularly interspaced short palindromic repeats) loci refers to certain genetic loci encoding factors of DNA cleavage systems, for example, used by bacterial and archaeal cells to destroy foreign DNA (Horvath and Barrangou, 2010, Science 327:167-170). A CRISPR locus can consist of a CRISPR array, comprising short direct repeats (CRISPR repeats) separated by short variable DNA sequences (called ‘spacers’), which can be flanked by diverse Cas (CRISPR-associated) genes. Multiple CRISPR-Cas systems have been described including Class 1 systems, with multisubunit effector complexes, and Class 2 systems, with single protein effectors (such as but not limiting to Cas9, Cpf1, C2c1,C2c2, C2c3). (Zetsche et al., 2015, Cell 163, 1-13; Shmakov et al., 2015, Molecular_Cell 60, 1-13; Makarova et al. 2015, Nature Reviews Microbiology Vol. 13:1-15, WO 2013/176772 A1 published on Nov. 23, 2013 and incorporated by its entirety by reference herein). CRISPR systems belong to different classes, with different repeat patterns, sets of genes, and species ranges.

[0043] The type II CRISPR/Cas system from bacteria employs a crRNA (CRISPR RNA) and tracrRNA (trans-activating CRISPR RNA) to guide a Cas9 endonuclease (encoded by a cas9 gene) to its DNA target. The crRNA contains a spacer region complementary to one strand of the double strand DNA target and a region that base pairs with the tracrRNA (trans-activating CRISPR RNA) forming a RNA duplex that directs the Cas9 endonuclease to cleave the DNA target. Spacers are acquired through a not fully understood process involving Cas1 and Cas2 proteins. All type II CRISPR-Cas loci contain cas1 and cas2 genes in addition to the cas9 gene (Makarova et al. 2015, Nature Reviews Microbiology Vol. 13:1-15). Type II CRISPR-Cas loci can encode a tracrRNA, which is partially complementary to the repeats within the respective CRISPR array, and can comprise other proteins such as Csn1 and Csn2. The presence of cas9 in the vicinity of cas1 and cas2 genes is the hallmark of type II loci (Makarova et al. 2015, Nature Reviews Microbiology Vol. 13:1-15).

[0044] The number of CRISPR-associated genes at a given CRISPR locus can vary between species (Haft et al., 2005, Computational Biology, PLoS Comput Biol 1(6): e60. doi:10.1371/journal.pcbi.0010060; Makarova et al. 2015, Nature Reviews Microbiology Vol. 13:1-15; WO 2013/176772 A1 published on Nov. 23, 2013 and incorporated by its entirety by reference herein).

[0045] “Cas9” (formerly referred to as Cas5, Csn1, or Csx12) herein refers to a Cas (CRISPR-associated) endonuclease that when in complex with a suitable polynucleotide component (such as crNucleotide and a tracrNucleotide, or a single guide polynucleotide) is capable of recognizing, binding to, and optionally nicking or cleaving all or part of a DNA target sequence. A Cas9 protein comprises a HNH domain and a RuvC nuclease domain, each of which can cleave a single DNA strand at a target sequence (the concerted action of both domains leads to DNA double-strand cleavage, whereas activity of one domain leads to a nick). In general, the RuvC domain comprises subdomains I, II and III, where domain I is located near the N-terminus of Cas9 and subdomains II and III are located in the middle of the protein, flanking the HNH domain (Hsu et al, Cell 157:1262-1278). Cas9 endonucleases are typically derived from a type II CRISPR system, which includes a DNA cleavage system utilizing a Cas9 endonuclease in complex with at least one polynucleotide component. For example, a Cas9 can be in complex with a CRISPR RNA (crRNA) and a trans-activating CRISPR RNA (tracrRNA). In another example, a Cas9 can be in complex with a single guide RNA (Makarova et al. 2015, Nature Reviews Microbiology Vol. 13:1-15).

[0046] The term “cas9 gene” herein refers to a gene encoding a Cas9 endonuclease.

[0047] As used herein, the terms “guide polynucleotide/Cas9 endonuclease complex”, “guide polynucleotide/Cas9 endonuclease system”, “guide polynucleotide/Cas9 complex”, “guide polynucleotide/Cas9 system”, “Polynucleotide-guided endonuclease”, “PGEN”, “guided Cas system” are used interchangeably herein and refer to at least one guide polynucleotide and at least one Cas9 endonuclease that are capable of forming a complex, wherein said guide polynucleotide/Cas9 endonuclease complex can direct the Cas9 endonuclease to a DNA target site, enabling the Cas9 endonuclease to recognize, bind to, and optionally nick or cleave (introduce a single or double strand break) the DNA target site. A guide polynucleotide/Cas9 endonuclease complex herein can comprise Cas9 protein(s) and suitable polynucleotide component(s) of any of the known CRISPR systems (Horvath and Barrangou, 2010, Science 327:167-170; Makarova et al. 2015, Nature Reviews Microbiology Vol. 13:1-15). A Cas9 endonuclease unwinds the DNA duplex at the target sequence and optionally cleaves at least one DNA strand, as mediated by recognition of the target sequence by a polynucleotide (such as, but not limited to, a crRNA or guide RNA) that is in complex with the Cas9 protein. Such recognition and cutting of a target sequence by a Cas9 endonuclease typically occurs if the correct protospacer-adjacent motif (PAM) is located at or adjacent to the 3′ end of the DNA target sequence. Alternatively, a Cas9 protein herein may lack DNA cleavage or nicking activity, but can still specifically bind to a DNA target sequence when complexed with a suitable RNA component. (See also U.S. Patent Application US 2015-0082478 A1, published on Mar. 19, 2015 and US 2015-0059010 A1, published on Feb. 26, 2015, both are incorporated in their entirety by reference herein).

[0048] A guide polynucleotide/Cas9 endonuclease complex can cleave one or both strands of a DNA target sequence. A guide polynucleotide/Cas9 endonuclease complex that can cleave both strands of a DNA target sequence typically comprises a Cas9 protein that has all of its endonuclease domains in a functional state (e.g., wild type endonuclease domains or variants thereof retaining some or all activity in each endonuclease domain). Thus, a wild type Cas9 protein, or a variant thereof retaining some or all activity in each endonuclease domain of the Cas9 protein, is a suitable example of a Cas9 endonuclease that can cleave both strands of a DNA target sequence. A Cas9 protein comprising functional RuvC and HNH nuclease domains is an example of a Cas9 protein that can cleave both strands of a DNA target sequence. A guide polynucleotide/Cas9 endonuclease complex that can cleave one strand of a DNA target sequence can be characterized herein as having nickase activity (e.g., partial cleaving capability). A Cas9 nickase typically comprises one functional endonuclease domain that allows the Cas9 to cleave only one strand (i.e., make a nick) of a DNA target sequence. For example, a Cas9 nickase may comprise (i) a mutant, dysfunctional RuvC domain and (ii) a functional HNH domain (e.g., wild type HNH domain). As another example, a Cas9 nickase may comprise (i) a functional RuvC domain (e.g., wild type RuvC domain) and (ii) a mutant, dysfunctional HNH domain. Non-limiting examples of Cas9 nickases suitable for use herein are disclosed in U.S. Patent Appl. Publ. No. 2014/0189896, which is incorporated herein by reference.

[0049] A pair of Cas9 nickases can be used to increase the specificity of DNA targeting. In general, this can be done by providing two Cas9 nickases that, by virtue of being associated with RNA components with different guide sequences, target and nick nearby DNA sequences on opposite strands in the region for desired targeting. Such nearby cleavage of each DNA strand creates a double strand break (i.e., a DSB with single-stranded overhangs), which is then recognized as a substrate for non-homologous-end-joining, NHEJ (prone to imperfect repair leading to mutations) or homologous recombination, HR. Each nick can be at least about 5, 10, 15, 20, 30, 40, 50, 60, 70, 80, 90, or 100 (or any integer between 5 and 100) bases apart from each other, for example. One or two Cas9 nickase proteins herein can be used in a Cas9 nickase pair. For example, a Cas9 nickase with a mutant RuvC domain, but functioning HNH domain (i.e., Cas9 HNH+/RuvC-), could be used (e.g., Streptococcus pyogenes Cas9 HNH+/RuvC-). Each Cas9 nickase (e.g., Cas9 HNH+/RuvC-) would be directed to specific DNA sites nearby each other (up to 100 base pairs apart) by using suitable RNA components herein with guide RNA sequences targeting each nickase to each specific DNA site.

[0050] A Cas9 protein can be part of a fusion protein comprising one or more heterologous protein domains (e.g., 1, 2, 3, or more domains in addition to the Cas9 protein). Such a fusion protein may comprise any additional protein sequence, and optionally a linker sequence between any two domains, such as between Cas9 and a first heterologous domain. Examples of protein domains that may be fused to a Cas9 protein herein include, without limitation, epitope tags (e.g., histidine [His], V5, FLAG, influenza hemagglutinin [HA], myc, VSV-G, thioredoxin [Trx]), reporters (e.g., glutathione-5-transferase [GST], horseradish peroxidase [HRP], chloramphenicol acetyltransferase [CAT], beta-galactosidase, beta-glucuronidase [GUS], luciferase, green fluorescent protein [GFP], HcRed, DsRed, cyan fluorescent protein [CFP], yellow fluorescent protein [YFP], blue fluorescent protein [BFP]), and domains having one or more of the following activities: methylase activity, demethylase activity, transcription activation activity (e.g., VP16 or VP64), transcription repression activity, transcription release factor activity, histone modification activity, RNA cleavage activity and nucleic acid binding activity. A Cas9 protein can also be in fusion with a protein that binds DNA molecules or other molecules, such as maltose binding protein (MBP), S-tag, Lex A DNA binding domain (DBD), GAL4A DNA binding domain, and herpes simplex virus (HSV) VP16.

[0051] A guide polynucleotide/Cas9 endonuclease complex in certain embodiments can bind to a DNA target site sequence, but does not cleave any strand at the target site sequence. Such a complex may comprise a Cas9 protein in which all of its nuclease domains are mutant, dysfunctional. For example, a Cas9 protein herein that can bind to a DNA target site sequence, but does not cleave any strand at the target site sequence, may comprise both a mutant, dysfunctional RuvC domain and a mutant, dysfunctional HNH domain. A Cas9 protein herein that binds, but does not cleave, a target DNA sequence can be used to modulate gene expression, for example, in which case the Cas protein could be fused with a transcription factor (or portion thereof) (e.g., a repressor or activator, such as any of those disclosed herein).

[0052] The Cas9 endonuclease gene herein can be a plant, microbial, animal or mammalian codon optimized Cas9 endonuclease gene. The Cas9 endonuclease gene can be operably linked to a SV40 nuclear targeting signal upstream of the Cas codon region and a bipartite VirD2 nuclear localization signal (Tinland et al. (1992) Proc. Natl. Acad. Sci. USA 89:7442-6) downstream of the Cas9 codon region.

[0053] Cas9 endonucleases are typically derived from a type II CRISPR system, which includes a DNA cleavage system utilizing a Cas9 endonuclease in complex with at least one polynucleotide component. For example, a Cas9 can be in complex with a CRISPR RNA (crRNA) and a trans-activating CRISPR RNA (tracrRNA). In another example, a Cas9 can be in complex with a single guide RNA (Makarova et al. 2015, Nature Reviews Microbiology Vol. 13:1-15).

[0054] In one embodiment of the disclosure, the composition comprises at least one Cas9 endonuclease selected from the group consisting of SEQ ID NOs: 47-69, a functional fragment of SEQ ID NOs: 47-69, and a functional variant of SEQ ID NOs: 47-69.

[0055] In one embodiment of the disclosure, the composition comprises at least one recombinant DNA (such as a vector) encoding the Cas9 endonuclease selected from the group consisting of SEQ ID NOs: 47-69, a functional fragment of SEQ ID NOs: 47-69, and a functional variant of SEQ ID NOs: 47-69 (such as a recombinant DNA comprising the DNA sequences form SEQ ID NO: 24-46, a functional fragment of SEQ ID NOs: 24-46, and a functional variant of SEQ ID NOs: 24-46), or mRNA encoding Cas9 endonuclease selected from the group consisting of SEQ ID NOs: 47-69, a functional fragment of SEQ ID NOs: 47-69, and a functional variant of SEQ ID NOs: 47-69. The Cas9 endonuclease selected from the group consisting of SEQ ID NOs: 47-69, a functional fragment of SEQ ID NOs: 47-69, and a functional variant of SEQ ID NOs: 47-69 can form a (Ribonucleotide Protein—RNP) complex with at least one guide RNA, wherein said complex is capable of recognizing, binding to, and optionally nicking or cleaving all or part of a target site.

[0056] Recombinant DNA expressing the Cas9 endonucleases described herein (including, variants, functional fragments thereof, plant -, microbe -,or mammalian-codon optimized Cas9 endonuclease) can be stably integrated into the genome of an organism. For example, plants can be produced that comprise a cas9 gene stably integrated in the plant's genome. Plants expressing a stably integrated Cas endonuclease can be exposed to at least one guide RNA and/or a polynucleotide modification templates and/or donor DNAs to enable genome modifications such as gene knockout, gene editing or DNA insertions.

[0057] The terms “functional fragment”, “fragment that is functionally equivalent” and “functionally equivalent fragment” of a Cas9 endonuclease are used interchangeably herein, and refer to a portion or subsequence of the Cas9 endonuclease sequence of the present disclosure in which the ability to recognize, bind to, and optionally nick or cleave (introduce a single or double strand break in) the target site is retained.

[0058] Functional fragments of a Cas9 endonuclease of the present disclosure include proteins comprising at least one domain selected from the group consisting of a guide polynucleotide binding domain (an amino acid domain that can bind to or hybridize to a guide RNA), a crRNA binding domain (an amino acid domain that can bind to or hybridize to a crRNA), a tracrRNA binding domain (an amino acid domain that can bind to or hybridize to a tracrRNA), a DNA binding domain (an amino acid domain that can bind to DNA target sequence), a DNA cleavage domain (such as an HNH or RuvC domain) and any combination thereof.

[0059] Functional fragments of Cas9 endonucleases of the present disclosure include fragments comprising 50-100, 100-200, 100-300, 100-400, 100-500, 100-600, 100-700, 100-800, 100-900, 100-1000, 200-300, 200-400, 200-500, 200-600, 200-700, 200-800, 200-900, 200-1000, 300-400, 300-500, 300-600, 300-700, 300-800, 300-900, 300-1000, 400-500, 400-600, 400-700, 400-800, 400-900, 400-1000, 500-600, 500-700, 500-800, 500-900, 500-1000, 600-700, 600-800, 600-900, 600-1000, 700-800, 700-900, 700-1000, 800-900, 800-1000, or 900-1000 amino acids of a reference Cas9 protein, such as the reference Cas9 endonucleases of the present disclosure of SEQ ID NOs:46-69.

[0060] Functional fragments of the Cas9 endonucleases of the present disclosure include a protein comprising one or more protein domains of the Cas9 endonuclease of SEQ ID NOs: 46-69, wherein said protein retains specific binding activity, and optionally endonucleolytic activity, towards a target DNA when associated with a polynucleotide component.

[0061] The terms “functional variant”, “Variant that is functionally equivalent” and “functionally equivalent variant” of a Cas9 endonuclease are used interchangeably herein, and refer to a variant of the Cas9 endonuclease of the present disclosure in which the ability to recognize, bind to, and optionally nick or cleave (introduce a single or double strand break in) the target site is retained.

[0062] A functional variant of a Cas9 protein sequence may be used, but should have specific binding activity, and optionally endonucleolytic activity, toward DNA when associated with a polynucleotide component herein. Such a functional variant of Cas9 may comprise an amino acid sequence that is at least about 80%, 81%, 82%, 83%, 84%, 85%, 86%, 87%, 88%, 89%, 90%, 91%, 92%, 93%, 94%, 95%, 96%, 97%, 98%, or 99% identical to the amino acid sequence of the reference Cas9, such as the reference Cas9 endonucleases described herein, including the Cas9 endonucleases of SEQ ID NOs: 47-69. Such a variant Cas9 protein can have specific binding activity, and optionally cleavage or nicking activity, toward DNA when associated with an RNA component herein. Cas9 variants include Cas9 endonuclease proteins wherein the HNH domain and/or the RuvC domain contains at least one amino acid change (e.g., deletion, insertion, or substitution). In some embodiments, the amino acid variation resulting in at least about 80%, 81%, 82%, 83%, 84%, 85%, 86%, 87%, 88%, 89%, 90%, 91%, 92%, 93%, 94%, 95%, 96%, 97%, 98%, or 99% identity to the amino acid sequence of the reference Cas9 protein, is located inside the HNH domain, or inside the RuvC domain, or inside both the HNH and RuvC domain. In some embodiments, the amino acid variation resulting in at least about 80%, 81%, 82%, 83%, 84%, 85%, 86%, 87%, 88%, 89%, 90%, 91%, 92%, 93%, 94%, 95%, 96%, 97%, 98%, or 99% identity to the amino acid sequence of the reference Cas9 protein, is located outside of the HNH domain, or outside the RuvC domain, or outside both the HNH and RuvC domain.

[0063] Multiple functional domains and conserved elements were determined for each of the novel Cas9 endonuclease protein of the present disclosure (see Example 2, Tables 13-14). The novel Cas9 endonucleases of the present disclosure comprised an HNH domain, an RuvC domain that included three subdomains (RuvC-I, Ruvc-II and RuvC-II), a Bridge-Helix domain a PAM interacting domain and DNA/RNA recognition regions including REC1 and REC1′. The REC1 binds to repeat:anti-repeat RNA duplex of the guide RNA while REC1′ mainly interacts with targetDNA:guide RNA hybrid duplex. The REC2 domain is a conserved element.

[0064] In some aspects the RuvC-I domain of a Cas9 endonuclease can be 40, 41, 42, 43, 44, 45, 46, 47, 47, 48, 49, 50, 51, 52, 53, 54, 55, 56, 57, 58, 59, 60, 61, 62, 63, 64, 65, 66, 67, 68, 69, 70, 71, 72, 73, 74, 75, 76, 77, 78, 79 or 80 amino acids in length. The RuvC-I domain can be located next to anyone of the amino acid domains selected from the group consisting of HNH, RuvC-I, RuvC-II, RuvC-III, REC1, REC1′, REC-2, Bridge Helix (BH) and PAM interacting (PI) domain. Tables 13-14 described herein the location of the RuvC-I domain of each of the Cas9 endonucleases of the present disclosure and based on this information one can design novel Cas9 endonucleases comprising any one of the RuvC-I domain selected from the group consisting of the RuvC-I domain of Cas-Locus-6, the RuvC-I domain of Cas-Locus 7, the RuvC-I domain of Cas-locus-8, the RuvC-I domain of Cas-Locus-9, the RuvC-I domain of Cas-locus-10, the RuvC-I domain of Cas-Locus-11, Cas-Locus-12, the RuvC-I domain of Cas-Locus 13, the RuvC-I domain of Cas-locus-14, the RuvC-I domain of Cas-Locus-15, the RuvC-I domain of Cas-locus-16, the RuvC-I domain of Cas-Locus-17, Cas-Locus-18, the RuvC-I domain of Cas-Locus 19, the RuvC-I domain of Cas-locus-20, the RuvC-I domain of Cas-Locus-21, the RuvC-I domain of Cas-locus-22, the RuvC-I domain of Cas-Locus-23, the RuvC-I domain of Cas-locus-24, the RuvC-I domain of Cas-Locus-25, the RuvC-I domain of Cas-locus-26, the RuvC-I domain of Cas-Locus-27, the RuvC-I domain of Cas-locus-28, a function fragment thereof, and a functional variant thereof. (A functional fragment or functional variant of a RuvC-I domain is a fragment or variant in which the ability to function as a RuvC-I domain is retained).

[0065] In some aspects the Bridge-Helix (BH) domain of a Cas9 endonuclease can be 35, 36, 37, 38, 39, 40, 41, 42, 43, 44, 45, 46 or 47 amino acids in length. The BH domain can be located next to anyone of the amino acid domains selected from the group consisting of HNH, RuvC-I, RuvC-II, RuvC-III, REC1, REC1′, REC-2, Bridge Helix (BH) and PAM interacting (PI) domain. Tables 13-14 described herein the location of the BH domain of each of the Cas9 endonucleases of the present disclosure and based on this information one can design novel Cas9 endonucleases comprising any one of the BH domain selected from the group consisting of the BH domain of Cas-Locus-6, the BH domain of Cas-Locus 7, the BH domain of Cas-locus-8, the BH domain of Cas-Locus-9, the BH domain of Cas-locus-10, the BH domain of Cas-Locus-11, Cas-Locus-12, the BH domain of Cas-Locus 13, the BH domain of Cas-locus-14, the BH domain of Cas-Locus-15, the BH domain of Cas-locus-16, the BH domain of Cas-Locus-17, Cas-Locus-18, the BH domain of Cas-Locus 19, the BH domain of Cas-locus-20, the BH domain of Cas-Locus-21, the BH domain of Cas-locus-22, the BH domain of Cas-Locus-23, the BH domain of Cas-locus-24, the BH domain of Cas-Locus-25, the BH domain of Cas-locus-26, the BH domain of Cas-Locus-27, the BH domain of Cas-locus-28, a function fragment thereof, and a functional variant thereof. (A functional fragment or functional variant of a BH domain is a fragment or variant in which the ability to function as a BH domain is retained).

[0066] In some aspects the REC1 domain of a Cas9 endonuclease can be 83, 84, 85, 86, 87, 88, 89, 90, 91, 92, 93, 94, 95, 96, 97, 98, 99, 100, 101, 102, 103, 104, 105, 106, 107, 108, 109, 110, 111, 112, 113, 114, 115, 116, 117, 118, 119, 120, 121, 122, 123, 124, 125, 126, 127, 128, 129, 130, 131, 132, 133, 134, 135, 136, 137, 138, 139, 140, 141, 142, 143, 144, 145, 146, 147, 148, 149, 150, 151, 152, 153, 154, 155, 156, 157, 158, 159, 160, 161, 162, 163, 164, 165, 166, 167, 168, 169, 170, 171, 172, 173, 174, 175, 176, 177, 178, 179, 180, 181, 182, 183, 184, 185, 186, 187, 188, 189, 190, 191, 192, 193, 194, 195, 196, 197, 198, 199, 200, 201, 202, 203, 204, 205, 206, 207, 208, 209, 210, 211, 212, 213, 214, 215, 216, 217, 218, 219, 220, 221, 222, 223, 224, 225, 226, 227, 228, 229, 230, 231, 232, 233, 234, 235, 236, 237, 238, 239, 240, 241, 242, 243, 244, 245, 246, 247, 248, 249, 250, 251, 252, 253, 254, 255, 256, 257, 258, 259, 260, 261, 262, 263, 264, 265, 266, 267, 268, 269, 270, 271, 272, 273, 274, 275, 276, 277, 278, 279, 280, 281, 282, 283, 284, 285, 286, 287, 288, 289, 290, 291, 292, 293, 294, 295, 296, 297, 298, 299, 300, 301, 302, 303, 304 or 305 amino acids in length. The REC1 domain can be located next to anyone of the amino acid domains selected from the group consisting of HNH, RuvC-I, RuvC-II, RuvC-III, REC1, REC1′, REC-2, Bridge Helix (BH) and PAM interacting (PI) domain. Tables 13-14 described herein the location of the REC1 domain of each of the Cas9 endonucleases of the present disclosure and based on this information one can design novel Cas9 endonucleases comprising any one of the REC1 domain selected from the group consisting of the REC1 domain of Cas-Locus-6, the REC1 domain of Cas-Locus 7, the REC1 domain of Cas-locus-8, the REC1 domain of Cas-Locus-9, the REC1 domain of Cas-locus-10, the REC1 domain of Cas-Locus-11, Cas-Locus-12, the REC1 domain of Cas-Locus 13, the REC1 domain of Cas-locus-14, the REC1 domain of Cas-Locus-15, the REC1 domain of Cas-locus-16, the REC1 domain of Cas-Locus-17, Cas-Locus-18, the REC1 domain of Cas-Locus 19, the REC1 domain of Cas-locus-20, the REC1 domain of Cas-Locus-21, the REC1 domain of Cas-locus-22, the REC1 domain of Cas-Locus-23, the REC1 domain of Cas-locus-24, the REC1 domain of Cas-Locus-25, the REC1 domain of Cas-locus-26, the REC1 domain of Cas-Locus-27, the REC1 domain of Cas-locus-28, a function fragment thereof, and a functional variant thereof. (A functional fragment or functional variant of a REC1 domain is a fragment or variant in which the ability to function as a REC1 domain is retained).

[0067] In some aspects the REC2 domain of a Cas9 endonuclease can be 130, 131, 132, 133, 134, 135, 136, 137, 138, 139, 140, 141, 142, 143, 144, 145, 146, 147, 148, 149, 150, 151, 152, 153, 154, 155, or 156 amino acids in length. The REC2 domain can be located next to anyone of the amino acid domains selected from the group consisting of HNH, RuvC-I, RuvC-II, RuvC-III, REC1, REC1′, REC-2, Bridge Helix (BH) and PAM interacting (PI) domain. Tables 13-14 described herein the location of the REC2 domain of each of the Cas9 endonucleases of the present disclosure and based on this information one can design novel Cas9 endonucleases comprising any one of the REC2 domain selected from the group consisting of the REC2 domain of Cas-Locus-6, the REC2 domain of Cas-Locus 7, the REC2 domain of Cas-locus-8, the REC2 domain of Cas-Locus-9, the REC2 domain of Cas-locus-10, the REC2 domain of Cas-Locus-11, Cas-Locus-12, the REC2 domain of Cas-Locus 13, the REC2 domain of Cas-locus-14, the REC2 domain of Cas-Locus-15, the REC2 domain of Cas-locus-16, the REC2 domain of Cas-Locus-17, Cas-Locus-18, the REC2 domain of Cas-Locus 19, the REC2 domain of Cas-locus-20, the REC2 domain of Cas-Locus-21, the REC2 domain of Cas-locus-22, the REC2 domain of Cas-Locus-23, the REC2 domain of Cas-locus-24, the REC2 domain of Cas-Locus-25, the REC2 domain of Cas-locus-26, the REC2 domain of Cas-Locus-27, the REC2 domain of Cas-locus-28, a function fragment thereof, and a functional variant thereof. (A functional fragment or functional variant of a REC2 domain is a fragment or variant in which the ability to function as a REC2 domain is retained).

[0068] In some aspects the REC1′ domain of a Cas9 endonuclease can be 213, 214, 215, 216, 217, 218, 219, 220, 221,222, 223, 224, 225, 226, 227, 228, 229, 230, 231, 232, 233, 234, 235, 236, 237, 238, 239, 240, 241, 242, 243, 244, 245, 246, 247, 248, 249, 250, 251, 252, 253, 254, 255, 256, 257, 258, 259, 260, 261, 262, 263, 264, 265, 266, 267, 268, 269, 270, 271, 272, 273, 274, 275, 276, 277, 278, 279, 280, 281, 282, 283, 284, 285, 286, 287, 288, 289, 290, 291, 292, 293, 294, 295, 296, 297, 298, 299, 300, 301, 302, 303, 304, 305, 306, 307, 308, 309, 310, 311, 312, 313, 314, 315, 316, 317, 318, 319, 320, 321, 322, 323, 324, 325, 326, 327, 328, 329, 330, 331, 332, 333, 334, 335, 336, 337, 338, 339, 340, 341, 342, 343, 344, 345, 346, 347, 348, 349, 350, 351, 352, 353, 354, 355, 356, 357, 358, 359, 360, 361, 362, 363, 364, 365, 366, 367, 368, 369, 360, 371, 372, 373, 374, 375, 376, 377, 378, 379, 380, 381, 382, 383, 384, 385, 386, 387, 388, 389, 390, 391, 392, 393, 394, 395, 396, 397, 398, 399, 400, 401, 402, 403, 405, 406, 407, 408, 409, 410, 411, 412, 413, 414, 415, 416 or 417 amino acids in length. The REC1′ domain can be located next to anyone of the amino acid domains selected from the group consisting of HNH, RuvC-I, RuvC-II, RuvC-III, REC1, REC1′, REC-2, Bridge Helix (BH) and PAM interacting (PI) domain. Tables 13-14 described herein the location of the REC1′ domain of each of the Cas9 endonucleases of the present disclosure and based on this information one can design novel Cas9 endonucleases comprising any one of the REC1′ domain selected from the group consisting of the REC1′ domain of Cas-Locus-6, the REC1′ domain of Cas-Locus 7, the REC1′ domain of Cas-locus-8, the REC1′ domain of Cas-Locus-9, the REC1′ domain of Cas-locus-10, the REC1′ domain of Cas-Locus-11, Cas-Locus-12, the REC1′ domain of Cas-Locus 13, the REC1′ domain of Cas-locus-14, the REC1′ domain of Cas-Locus-15, the REC1′ domain of Cas-locus-16, the REC1′ domain of Cas-Locus-17, Cas-Locus-18, the REC1′ domain of Cas-Locus 19, the REC1′ domain of Cas-locus-20, the REC1′ domain of Cas-Locus-21, the REC1′ domain of Cas-locus-22, the REC1′ domain of Cas-Locus-23, the REC1′ domain of Cas-locus-24, the REC1′ domain of Cas-Locus-25, the REC1′ domain of Cas-locus-26, the REC1′ domain of Cas-Locus-27, the REC1′ domain of Cas-locus-28, a function fragment thereof, and a functional variant thereof. (A functional fragment or functional variant of a REC1′ domain is a fragment or variant in which the ability to function as a REC1′ domain is retained).

[0069] In some aspects the RuvC-II domain of a Cas9 endonuclease can be 45, 46, 47, 47, 48, 49, 50, 51, 52, 53, 54, 55, 56, 57, 58, 59, 60, 61, 62, 63, 64, 65, 66, 67, 68, 69, 70, 71, 72, 73, 74, 75, 76, 77, 78, 79, 80, 81, 82 83, 84, 85, 86, 87, 88, 89, 90, 91, 92, 93, 94, 95, 96, 97, 98, 99, 100, 101, 102, 103, 104, 105, 106, 107, 108, 109, 110, 111, 112, 113, 114, 115, 116, 117, 118, 119, 120, 121, 122, 123, 124, 125, 126, 127, 128, 129, 130, 131, 132, 133, 134, 135, 136, 137,138,139, 140, 141, 142, 143, 144, 145, 146, 147, 148, 149, 150, 151, 152, 153, 154, 155, 156, 157, 158, 159, 160, 161, 162, 163, 164, 165, 166, 167, 168, 169, 170, 171, 172, 173, 174, 175, 176, 177, 178, 179, 180, 181, 182, 183, 184, 185, 186, 187, 188, 189, 190, 191, 192, 193, 194, 195, 196, 197, 198, 199, 200, 201, 202, 203, 204, 205, 206, 207, 208, 209, 210, 211, 212, 213, 214, 215, 216, 217, 218, 219, 220, 221, 222, 223, 224, 225, 226, 227, 228, 229, 230, 231, 232, 233, 234, 235, 236, 237, 238, 239, 240, 241, 242, 243, 244 or 245 amino acids in length. The RuvC-II domain can be located next to anyone of the amino acid domains selected from the group consisting of HNH, RuvC-I, RuvC-II, RuvC-III, REC1, REC1′, REC-2, Bridge Helix (BH) and PAM interacting (PI) domain. Tables 13-14 described herein the location of the RuvC-II domain of each of the Cas9 endonucleases of the present disclosure and based on this information one can design novel Cas9 endonucleases comprising any one of the RuvC-II domain selected from the group consisting of the RuvC-II domain of Cas-Locus-6, the RuvC-II domain of Cas-Locus 7, the RuvC-II domain of Cas-locus-8, the RuvC-II domain of Cas-Locus-9, the RuvC-II domain of Cas-locus-10, the RuvC-II domain of Cas-Locus-11, Cas-Locus-12, the RuvC-II domain of Cas-Locus 13, the RuvC-II domain of Cas-locus-14, the RuvC-II domain of Cas-Locus-15, the RuvC-II domain of Cas-locus-16, the RuvC-II domain of Cas-Locus-17, Cas-Locus-18, the RuvC-II domain of Cas-Locus 19, the RuvC-II domain of Cas-locus-20, the RuvC-II domain of Cas-Locus-21, the RuvC-II domain of Cas-locus-22, the RuvC-II domain of Cas-Locus-23, the RuvC-II domain of Cas-locus-24, the RuvC-II domain of Cas-Locus-25, the RuvC-II domain of Cas-locus-26, the RuvC-II domain of Cas-Locus-27, the RuvC-II domain of Cas-locus-28, a function fragment thereof, and a functional variant thereof. (A functional fragment or functional variant of a RuvC-II domain is a fragment or variant in which the ability to function as a RuvC-II domain is retained).

[0070] In some aspects the HNH domain of a Cas9 endonuclease can be 153, 154, 155, 156, 157, 158, 159, 160, 161, 162, 163, 164, 165, 166, 167, 168, 169, 170, 171, 172, 173, 174, 175, 176, 177, 178, 179, 180, 181, 182, 183, 184, 185, 186, 187, 188, 189, 190, 191, 192, 193, 194, 195, 196, 197, 198, 199, 200, 201, 202, 203, 204, 205, 206, 207, 208, 209, 210, 211, 212, 213, 214, 215, 216 or 217 amino acids in length. The HNH domain can be located next to anyone of the amino acid domains selected from the group consisting of HNH, RuvC-I, RuvC-II, RuvC-III, REC1, REC1′, REC-2, Bridge Helix (BH) and PAM interacting (PI) domain. Tables 13-14 described herein the location of the HNH domain of each of the Cas9 endonucleases of the present disclosure and based on this information one can design novel Cas9 endonucleases comprising any one of the HNH domain selected from the group consisting of the HNH domain of Cas-Locus-6, the HNH domain of Cas-Locus 7, the HNH domain of Cas-locus-8, the HNH domain of Cas-Locus-9, the HNH domain of Cas-locus-10, the HNH domain of Cas-Locus-11, Cas-Locus-12, the HNH domain of Cas-Locus 13, the HNH domain of Cas-locus-14, the HNH domain of Cas-Locus-15, the HNH domain of Cas-locus-16, the HNH domain of Cas-Locus-17, Cas-Locus-18, the HNH domain of Cas-Locus 19, the HNH domain of Cas-locus-20, the HNH domain of Cas-Locus-21, the HNH domain of Cas-locus-22, the HNH domain of Cas-Locus-23, the HNH domain of Cas-locus-24, the HNH domain of Cas-Locus-25, the HNH domain of Cas-locus-26, the HNH domain of Cas-Locus-27, the HNH domain of Cas-locus-28, a function fragment thereof, and a functional variant thereof. (A functional fragment or functional variant of a HNH domain is a fragment or variant in which the ability to function as a HNH domain is retained).

[0071] In some aspects the RuvC-III domain of a Cas9 endonuclease can be 146, 147, 148, 149, 150, 151, 152, 153, 154, 155, 156, 157, 158, 159, 160, 161, 162, 163, 164, 165, 166, 167, 168, 169, 170, 171, 172, 173, 174, 175, 176, 177, 178, 179, 180, 181, 182, 183, 184, 185, 186, 187, 188, 189, 190, 191, 192, 193, 194, 195, 196, 197, 198, 199, 200, 201, 202, 203, 204, 205, 206, 207, 208, 209, 210, 211, 212, 213, 214, 215, 216, 217, 218, 219, 220, 221, 222, 223, 224, 225, 226, 227, 228, 229, 230, 231, 232, 233, 234, 235, 236, 237, 238, 239, 240, 241, 242, 243, 244, 245, 246, 247, 248, 249, 250, 251, 252, 253, 254, 255, 256, 257 or 258 amino acids in length. The RuvC-III domain can be located next to anyone of the amino acid domains selected from the group consisting of HNH, RuvC-I, RuvC-II, RuvC-III, REC1, REC1′, REC-2, Bridge Helix (BH) and PAM interacting (PI) domain. Tables 13-14 described herein the location of the RuvC-III domain of each of the Cas9 endonucleases of the present disclosure and based on this information one can design novel Cas9 endonucleases comprising any one of the RuvC-III domain selected from the group consisting of the RuvC-III domain of Cas-Locus-6, the RuvC-III domain of Cas-Locus 7, the RuvC-III domain of Cas-locus-8, the RuvC-III domain of Cas-Locus-9, the RuvC-III domain of Cas-locus-10, the RuvC-III domain of Cas-Locus-11, Cas-Locus-12, the RuvC-III domain of Cas-Locus 13, the RuvC-III domain of Cas-locus-14, the RuvC-III domain of Cas-Locus-15, the RuvC-III domain of Cas-locus-16, the RuvC-III domain of Cas-Locus-17, Cas-Locus-18, the RuvC-III domain of Cas-Locus 19, the RuvC-III domain of Cas-locus-20, the RuvC-III domain of Cas-Locus-21, the RuvC-III domain of Cas-locus-22, the RuvC-III domain of Cas-Locus-23, the RuvC-III domain of Cas-locus-24, the RuvC-III domain of Cas-Locus-25, the RuvC-III domain of Cas-locus-26, the RuvC-III domain of Cas-Locus-27, the RuvC-III domain of Cas-locus-28, a function fragment thereof, and a functional variant thereof.

[0072] In some aspects the PI domain of a Cas9 endonuclease can be 253, 254, 255, 256, 257, 258, 259, 260, 261, 262, 263, 264, 265, 266, 267, 268, 269, 270, 271, 272, 273, 274, 275, 276, 277, 278, 279, 280, 281, 282, 283, 284, 285, 286, 287, 288, 289, 290, 291, 292, 293, 294, 295, 296, 297, 298, 299, 300, 301, 302, 303, 304, 305, 306, 307, 308, 309, 310, 311, 312, 313, 314, 315, 316, 317, 318, 319, 320, 321,322, 323, 324, 325, 326, 327, 328, 329, 330, 331, 332, 333, 334, 335, 336, 337, 338, 339, 340, or 341 amino acids in length. The PI domain can be located next to anyone of the amino acid domains selected from the group consisting of HNH, RuvC-I, RuvC-II, RuvC-III, REC1, REC1′, REC-2, Bridge Helix (BH) and PAM interacting (PI) domain. Tables 13-14 described herein the location of the PI domain of each of the Cas9 endonucleases of the present disclosure and based on this information one can design novel Cas9 endonucleases comprising any one of the PI domain selected from the group consisting of the PI domain of Cas-Locus-6, the PI domain of Cas-Locus 7, the PI domain of Cas-locus-8, the PI domain of Cas-Locus-9, the PI domain of Cas-locus-10, the PI domain of Cas-Locus-11, Cas-Locus-12, the PI domain of Cas-Locus 13, the PI domain of Cas-locus-14, the PI domain of Cas-Locus-15, the PI domain of Cas-locus-16, the PI domain of Cas-Locus-17, Cas-Locus-18, the PI domain of Cas-Locus 19, the PI domain of Cas-locus-20, the PI domain of Cas-Locus-21, the PI domain of Cas-locus-22, the PI domain of Cas-Locus-23, the PI domain of Cas-locus-24, the PI domain of Cas-Locus-25, the PI domain of Cas-locus-26, the PI domain of Cas-Locus-27, the PI domain of Cas-locus-28, a function fragment thereof, and a functional variant thereof. (A functional fragment or functional variant of a PI domain is a fragment or variant in which the ability to function as a PI domain is retained).

[0073] Cas9 endonuclease functional fragments and Cas9 endonuclease variants can be obtained via methods such as site-directed mutagenesis and synthetic construction

[0074] Methods for determining if fragments and/or variants of a Cas9 endonuclease of the present disclosure are functional include methods that measure the endonuclease activity of the fragment or variant when in complex with a suitable polynucleotide. Methods that measure Cas9 endonuclease activity are well known in the art such as, but not limiting to, PCT/US13/39011, filed May 1, 2013, PCT/US16/32073 filed May 12, 2016, PCT/US16/32028 filed May 12, 2016, incorporated by reference herein). Methods for measuring Cas9 endonuclease activity include methods that measure the mutation frequency at a target site after a double strand break has occurred (see also, Example 3).

[0075] Methods for measuring Cas9 endonuclease activity include methods that measure the mutation frequency at a target site after a double strand break has occurred (see also, Example 3). Methods for measuring if a functional fragment or functional variant of a Cas9 endonuclease of the present disclosure can make a double strand break include the following method: The cellular repair of chromosomal double-strand breaks (DSBs) induced by CRISPR-Cas9 in plant cells results in the production of insertion or deletion (indel) mutagenesis (Svitashev et al. et al. (2015)). This outcome can be used to detect and monitor the production of DSBs generated by functional fragments of functional variant of the Cas9 endonucleases of the present disclosure (see also Karvelis et al. (2015). Briefly, appropriate CRISPR-Cas9 maize genomic DNA target sites can be selected, a guide RNA transcriptional cassette (recombinant DNA that expresses a guide RNA) and a DNA recombinant construct expressing the Cas9 endonuclease of the present disclosure (or a functional fragment of the Cas9 endonuclease of the present disclosure, or a functional variant of the Cas9 endonuclease variant of the present disclosure endonuclease (such as an expression cassette described in Example 2) can be constructed and can be co-delivered by biolistic transformation into Hi-Type II 10-day-old immature maize embryos (IMEs) in the presence of BBM and WUS2 genes as described in Svitashev et al. (2015). A visual marker DNA expression cassette encoding a yellow fluorescent protein can also be co-delivered with the guide RNA transcriptional cassette and the Cas9 endonuclease expression cassette (recombinant DNA construct) to aid in the selection of evenly transformed IMEs. After 2 days, the 20-30 most evenly transformed IMEs can be harvested based on their fluorescence. Total genomic DNA is extracted and the DNA region surrounding the intended target site is PCR amplified with Phusion® HighFidelity PCR Master Mix (New England Biolabs, M0531 L) adding on the sequences necessary for amplicon-specific barcodes and Illumnia sequencing and deep sequenced. The resulting reads are then examined for the presence of mutations at the expected site of cleavage by comparison to control experiments where the guide RNA transcriptional cassette was omitted from the transformation. If mutations are observed at the intended target sites when using a fragment or variant of the Cas9 endonuclease of the present disclosure, in complex with a suitable guide polynucleotide, the fragments or variants are functional.

[0076] Methods for measuring if a functional fragment of functional variant of a Cas9 endonuclease of the present disclosure can make a single strand break (also referred to as a nick; hence acts as a nickase) in the double stranded DNA target site include the following method: The cellular repair of chromosomal single-strand breaks (SSBs) in a double-stranded DNA target may be typically repaired seamlessly in plant cells such as maize. Therefore to examine a functional Cas9 fragment or functional variant of a Cas9 for nicking activity, two chromosomal DNA target sites in close proximity (0-200 bp), each targeting a different strand (sense and anti-sense DNA strands) of the double-stranded DNA, can be targeted. If SSB activity is present, the SSB activity from both target sites will result in a DNA double-strand break (DSB) that will result in the production of insertion or deletion (indel) mutagenesis in maize cells. This outcome can then be used to detect and monitor the activity of the Cas9 nickase similar to that described in Karvelis et al. (2015). Briefly, appropriate CRISPR-Cas9 maize genomic DNA target sites are selected, guide RNA transcription cassettes and functional fragment Cas9 nicking expression cassettes are constructed and co-delivered by biolistic transformation into Hi-Type II 10-day-old immature maize embryos (IMEs) in the presence of BBM and WUS2 genes as described in Svitashev et al. (2015). Since particle gun transformation can be highly variable, a visual marker DNA expression cassette encoding a yellow fluorescent protein can also be co-delivered to aid in the selection of evenly transformed IMEs [immature maize embryos]. After 2 days, the 20-30 most evenly transformed IMEs are harvested based on their fluorescence, total genomic DNA extracted, the region surrounding the intended target site PCR amplified with Phusion® HighFidelity PCR Master Mix (New England Biolabs, M0531 L) adding on the sequences necessary for amplicon-specific barcodes and Illumnia sequencing and deep sequenced. The resulting reads are then examined for the presence of mutations at the expected site of cleavage by comparison to control experiments where the small RNA transcriptional cassette was omitted from the transformation.

[0077] Methods for measuring if a functional fragment of functional variant of a Cas9 endonuclease of the present disclosure can bind to the intended DNA target site include the following method: The binding of a maize chromosomal DNA target site does not result in either a single-stranded break (SSB) or a double-stranded break (DSB) in the double-stranded DNA target site. Therefore to examine a functional Cas9 fragment for binding activity in maize cells, another nuclease domain (e.g. Fokl) may be attached to the functional Cas9 fragment with binding activity. If binding activity is present, the added nuclease domain may be used to produce a DSB that will result in the production of insertion or deletion (indel) mutagenesis in maize cells. This outcome may then be used to detect and monitor the binding activity of a Cas9 similar to that described in Karvelis et al. (2015). Briefly, appropriate CRISPR-Cas9 maize genomic DNA target sites can be selected, guide RNA transcription cassettes and functional fragment Cas9 binding and nuclease attached expression cassettes can be constructed and co-delivered by biolistic transformation into Hi-Type II 10-day-old immature maize embryos (IMEs) in the presence of BBM and WUS2 genes as described in Svitashev et al. (2015). A visual marker DNA expression cassette encoding a yellow fluorescent protein can also be co-delivered to aid in the selection of evenly transformed IMEs [immature maize embryos]. After 2 days, the 20-30 most evenly transformed IMEs can be harvested based on their fluorescence, total genomic DNA extracted, the region surrounding the intended target site PCR amplified with Phusion® HighFidelity PCR Master Mix (New England Biolabs, M0531 L) adding on the sequences necessary for amplicon-specific barcodes and Illumnia sequencing and deep sequenced. The resulting reads can then be examined for the presence of mutations at the expected site of cleavage by comparison to control experiments where the small RNA transcriptional cassette was omitted from the transformation.

[0078] Alternatively, the binding activity of maize chromosomal DNA target sites can be monitored by the transcriptional induction or repression of a gene. This can be accomplished by attaching a transcriptional activation or repression domain to the functional Cas9 binding fragment and targeting it to the promoter region of a gene and binding monitored through an increase in accumulation of the gene transcript or protein. The gene targeted for either activation or repression can be any naturally occurring maize gene or engineered gene (e.g. a gene encoded a red fluorescent protein) introduced into the maize genome by methods known in the art (e.g. particle gun or agrobacterium transformation).

[0079] The Cas9 endonuclease can comprise a modified form of the Cas9 polypeptide. The modified form of the Cas9 polypeptide can include an amino acid change (e.g., deletion, insertion, or substitution) that reduces the naturally-occurring nuclease activity of the Cas9 protein. For example, in some instances, the modified form of the Cas9 protein has less than 50%, less than 40%, less than 30%, less than 20%, less than 10%, less than 5%, or less than 1% of the nuclease activity of the corresponding wild-type Cas9 polypeptide (US patent application US20140068797 A1, published on Mar. 6, 2014). In some cases, the modified form of the Cas9 polypeptide has no substantial nuclease activity and is referred to as catalytically “inactivated Cas9” or “deactivated cas9 (dCas9).” Catalytically inactivated Cas9 variants include Cas9 variants that contain mutations in the HNH and RuvC nuclease domains. These catalytically inactivated Cas9 variants are capable of interacting with sgRNA and binding to the target site in vivo but cannot cleave either strand of the target DNA.

[0080] A catalytically inactive Cas9 can be fused to a heterologous sequence (US patent application US20140068797 A1, published on Mar. 6, 2014). Suitable fusion partners include, but are not limited to, a polypeptide that provides an activity that indirectly increases transcription by acting directly on the target DNA or on a polypeptide (e.g., a histone or other DNA-binding protein) associated with the target DNA. Additional suitable fusion partners include, but are not limited to, a polypeptide that provides for methyltransferase activity, demethylase activity, acetyltransferase activity, deacetylase activity, kinase activity, phosphatase activity, ubiquitin ligase activity, deubiquitinating activity, adenylation activity, deadenylation activity, SUMOylating activity, deSUMOylating activity, ribosylation activity, deribosylation activity, myristoylation activity, or demyristoylation activity. Further suitable fusion partners include, but are not limited to, a polypeptide that directly provides for increased transcription of the target nucleic acid (e.g., a transcription activator or a fragment thereof, a protein or fragment thereof that recruits a transcription activator, a small molecule/drug-responsive transcription regulator, etc.). A catalytically inactive Cas9 can also be fused to a Fokl nuclease to generate double strand breaks (Guilinger et al. Nature biotechnology, volume 32, number 6, June 2014).

[0081] A Cas9 protein herein can comprise a heterologous nuclear localization sequence (NLS). A heterologous NLS amino acid sequence herein may be of sufficient strength to drive accumulation of a Cas9 protein in a detectable amount in the nucleus of a yeast cell herein, for example. An NLS may comprise one (monopartite) or more (e.g., bipartite) short sequences (e.g., 2 to 20 residues) of basic, positively charged residues (e.g., lysine and/or arginine), and can be located anywhere in a Cas9 amino acid sequence but such that it is exposed on the protein surface. An NLS may be operably linked to the N-terminus or C-terminus of a Cas9 protein herein, for example. Two or more NLS sequences can be linked to a Cas9 protein, for example, such as on both the N- and C-termini of a Cas9 protein. The Cas9 endonuclease gene can be operably linked to a SV40 nuclear targeting signal upstream of the Cas9 codon region and a bipartite VirD2 nuclear localization signal (Tinland et al. (1992) Proc. Natl. Acad. Sci. USA 89:7442-6) downstream of the Cas9 codon region. Non-limiting examples of suitable NLS sequences herein include those disclosed in U.S. Pat. No. 7,309,576, which is incorporated herein by reference.

[0082] Cas9 endonucleases described herein can be used for targeted genome editing (via simplex and multiplex double-strand breaks and nicks) and targeted genome regulation (via tethering of epigenetic effector domains to either the Cas9 protein or guide polynucleotide (sgRNA or combination of crRNA+tracrRNA). A Cas9 endonuclease can also be engineered to function as an RNA-guided recombinase, and via RNA tethers could serve as a scaffold for the assembly of multiprotein and nucleic acid complexes (Mali et al., 2013, Nature Methods Vol. 10: 957-963).

[0083] The Cas9 protein, or functional fragment thereof, for use in the disclosed methods, can be isolated from a recombinant source where the genetically modified host cell (e.g. an insect cell or a yeast cell or human-derived cell line) is modified to express the nucleic acid sequence encoding the Cas9 protein. Alternatively, the Cas9 protein can be produced using cell free protein expression systems or be synthetically produced.

[0084] The term “plant-optimized Cas9 endonuclease” herein refers to a Cas9 protein encoded by a nucleotide sequence that has been optimized for expression in a plant cell or plant, and optionally for increased expression in a plant. A “plant-optimized nucleotide sequence encoding a Cas9 endonuclease”, “plant-optimized construct encoding a Cas9 endonuclease” and a “plant-optimized polynucleotide encoding a Cas9” are used interchangeably herein and refer to a nucleotide sequence encoding an Cas9 protein, or a variant or functional fragment thereof, that has been optimized for expression in a plant cell or plant. A plant comprising a plant-optimized Cas9 endonuclease includes a plant comprising the nucleotide sequence encoding for the Cas9 sequence and/or a plant comprising the Cas9 endonuclease protein. In one aspect, the plant-optimized Cas9 endonuclease nucleotide sequence is a maize-optimized, rice-optimized, wheat-optimized or soybean-optimized Cas9 endonuclease.

[0085] A plant-optimized nucleotide sequence, such as a plant-optimized Cas9 endonuclease DNA sequence, can be synthesized by modifying a nucleotide sequence using one or more plant-preferred codons for improved expression. See, for example, Campbell and Gowri (1990) Plant Physiol. 92:1-11 for a discussion of host-preferred codon usage.

[0086] The term “mammalian-optimized Cas9 endonuclease sequence” herein refers to a nucleotide sequence encoding a Cas9 endonuclease that has been optimized for expression in mammalian cells, particularly for increased expression in mammalian cells.

[0087] The Cas9 endonuclease described herein can be introduced into a cell by any method known in the art, for example, but not limited to transient introduction methods (such as Agrobacterium-mediated transformation, or particle mediated delivery such as biolistic particle bombardment), transfection, microinjection, and/or topical application or indirectly via recombination constructs. The Cas9 endonuclease can be introduced as a protein or as a guided polynucleotide complex (ribonucleotide complex, RNP complex) directly to a cell or indirectly via recombination constructs. The endonuclease can be introduced into a cell transiently or can be incorporated into the genome of the host cell using any method known in the art. Uptake of the endonuclease and/or the guided polynucleotide into the cell can be facilitated with a Cell Penetrating Peptide (CPP) as described in U.S. application 62/075,999, filed Nov. 6, 2014.

[0088] As used herein, the term “guide polynucleotide”, relates to a polynucleotide sequence that can form a complex with a Cas9 endonuclease and enables the Cas9 endonuclease to recognize, bind to, and optionally cleave a DNA target site. The guide polynucleotide can be a single molecule or a double molecule. The guide polynucleotide sequence can be a RNA sequence, a DNA sequence, or a combination thereof (a RNA-DNA combination sequence). Optionally, the guide polynucleotide can comprise at least one nucleotide, phosphodiester bond or linkage modification such as, but not limited, to Locked Nucleic Acid (LNA), 5-methyl dC, 2,6-Diaminopurine, 2′-Fluoro A, 2′-Fluoro U, 2′-O-Methyl RNA, phosphorothioate bond, linkage to a cholesterol molecule, linkage to a polyethylene glycol molecule, linkage to a spacer 18 (hexaethylene glycol chain) molecule, or 5′ to 3′ covalent linkage resulting in circularization. A guide polynucleotide that solely comprises ribonucleic acids is also referred to as a “guide RNA” or “gRNA” (See also U.S. Patent Application US 2015-0082478 A1, published on Mar. 19, 2015 and US 2015-0059010 A1, published on Feb. 26, 2015, both are hereby incorporated in its entirety by reference).

[0089] The guide polynucleotide can be a double molecule (also referred to as duplex guide polynucleotide) comprising a crNucleotide sequence and a tracrNucleotide sequence. The crNucleotide includes a first nucleotide sequence domain (referred to as Variable Targeting domain or VT domain) that can hybridize to a nucleotide sequence in a target DNA and a second nucleotide sequence (also referred to as a tracr mate sequence) that is part of a Cas endonuclease recognition (CER) domain. The tracr mate sequence can hybridized to a tracrNucleotide along a region of complementarity and together form the Cas endonuclease recognition domain or CER domain. The CER domain is capable of interacting with a Cas9 endonuclease polypeptide. The crNucleotide and the tracrNucleotide of the duplex guide polynucleotide can be RNA, DNA, and/or RNA-DNA-combination sequences. In some embodiments, the crNucleotide molecule of the duplex guide polynucleotide is referred to as “crDNA” (when composed of a contiguous stretch of DNA nucleotides) or “crRNA” (when composed of a contiguous stretch of RNA nucleotides), or “crDNA-RNA” (when composed of a combination of DNA and RNA nucleotides). The crNucleotide can comprise a fragment of the crRNA naturally occurring in Bacteria and Archaea. The size of the fragment of the crRNA naturally occurring in Bacteria and Archaea that can be present in a crNucleotide disclosed herein can range from, but is not limited to, 2, 3, 4, 5, 6, 7, 8, 9,10, 11, 12, 13, 14, 15, 16, 17, 18, 19, 20 or more nucleotides. In some embodiments the tracrNucleotide is referred to as “tracrRNA” (when composed of a contiguous stretch of RNA nucleotides) or “tracrDNA” (when composed of a contiguous stretch of DNA nucleotides) or “tracrDNA-RNA” (when composed of a combination of DNA and RNA nucleotides. In one embodiment, the RNA that guides the RNA/ Cas9 endonuclease complex is a duplexed RNA comprising a duplex crRNA-tracrRNA.

[0090] The tracrRNA (trans-activating CRISPR RNA, Deltcheva et al., Nature 471:602-607) contains, in the 5′-to-3′ direction, (i) a sequence that anneals with the repeat region of CRISPR type II crRNA (described herein as the anti-repeat region, such as but not limiting to SEQ ID NOs: 138-161), and (ii) a stem loop-containing portion (described herein as a 3′ tracrRNA such as but not limiting to SEQ ID NOs: 162-184)

[0091] The tracrRNA component of the single or duplex guide RNA for the Cas9 endonuclease systems described herein can comprise an anti-repeat fragment (including any one of SEQ ID NOs: 139-161) and a 3′ tracrRNA component (including any one of SEQ ID NO: 162-184). For example the tracrRNA can comprise SEQ ID NOs: 139 and 162, or SEQ ID NOs: 140 and 163, or SEQ ID NOs: 141 and 164, or SEQ ID NOs: 142 and 165, or SEQ ID NOs: 143 and 166, or SEQ ID NOs: 144 and 167, or SEQ ID NOs: 145 and 168, or SEQ ID NOs: 146 and 169, or SEQ ID NOs: 147 and 170, or SEQ ID NOs: 148 and 171, or SEQ ID NOs: 149 and 172, or SEQ ID NOs: 150 and 173, or SEQ ID NOs: 151 and 174, or SEQ ID NOs: 152 and 175, or SEQ ID NOs: 153 and 176, or SEQ ID NOs: 154 and 177, or SEQ ID NOs: 155 and 178, or SEQ ID NOs: 156 and 179, or SEQ ID NOs: 157 and 180, or SEQ ID NOs: 158 and 181, or SEQ ID NOs: 159 and 182, or SEQ ID NOs: 160 and 183, or SEQ ID NOs: 161 and 184.

[0092] The duplex guide polynucleotide can form a complex with a Cas9 endonuclease, wherein said guide polynucleotide/Cas9 endonuclease complex (also referred to as a guide polynucleotide/Cas9 endonuclease system) can direct the Cas9 endonuclease to a genomic target site, enabling the Cas9 endonuclease to recognize, bind to, and optionally nick or cleave (introduce a single or double strand break) into the target site. (See also U.S. Patent Application US 2015-0082478 A1, published on Mar. 19, 2015 and US 2015-0059010 A1, published on Feb. 26, 2015, both are hereby incorporated in its entirety by reference.)

[0093] A chimeric non-naturally occurring crRNA includes a crRNA that comprises regions that are not found together in nature (i.e., they are heterologous with each other. For example, a crRNA comprising a first nucleotide sequence domain (referred to as Variable Targeting domain or VT domain) that can hybridize to a nucleotide sequence in a target DNA, linked to a second nucleotide sequence (also referred to as a tracr mate sequence) such that the first and second sequence are not found linked together in nature. In one such example, a chimeric non-naturally occurring crRNA includes a VT domain that is capable of recognizing (or binding to) a target sequence in a eukaryotic genome.

[0094] The guide polynucleotide can also be a single molecule (also referred to as single guide polynucleotide) comprising a crNucleotide sequence linked to a tracrNucleotide sequence. The single guide polynucleotide comprises a first nucleotide sequence domain (referred to as Variable Targeting domain or VT domain) that can hybridize to a nucleotide sequence in a target DNA and a Cas9 endonuclease recognition domain (CER domain), that interacts with a Cas9 endonuclease polypeptide. By “domain” it is meant a contiguous stretch of nucleotides that can be RNA, DNA, and/or RNA-DNA-combination sequence. The VT domain and/or the CER domain of a single guide polynucleotide can comprise a RNA sequence, a DNA sequence, or a RNA-DNA-combination sequence. The single guide polynucleotide being comprised of sequences from the crNucleotide and the tracrNucleotide may be referred to as “single guide RNA” (when composed of a contiguous stretch of RNA nucleotides) or “single guide DNA” (when composed of a contiguous stretch of DNA nucleotides) or “single guide RNA-DNA” (when composed of a combination of RNA and DNA nucleotides). The single guide polynucleotide can form a complex with a Cas9 endonuclease, wherein said guide polynucleotide/Cas9 endonuclease complex (also referred to as a guide polynucleotide/Cas9 endonuclease system) can direct the Cas9 endonuclease to a genomic target site, enabling the Cas9 endonuclease to recognize, bind to, and optionally nick or cleave (introduce a single or double strand break) the target site. (See also U.S. Patent Application US 2015-0082478 A1, published on Mar. 19, 2015 and US 2015-0059010 A1, published on Feb. 26, 2015, both are hereby incorporated in its entirety by reference.)

[0095] A chimeric non-naturally occurring single guide RNA (sgRNA) includes a sgRNA that comprises regions that are not found together in nature (i.e., they are heterologous with each other). For example, a sgRNA comprising a first nucleotide sequence domain (referred to as Variable Targeting domain or VT domain) that can hybridize to a nucleotide sequence in a target DNA linked to a second nucleotide sequence (also referred to as a tracr mate sequence) that are not found linked together in nature.

[0096] The term “variable targeting domain” or “VT domain” is used interchangeably herein and includes a nucleotide sequence that can hybridize (is complementary) to one strand (nucleotide sequence) of a double strand DNA target site. The % complementation between the first nucleotide sequence domain (VT domain) and the target sequence can be at least 50%, 51%, 52%, 53%, 54%, 55%, 56%, 57%, 58%, 59%, 60%, 61%, 62%, 63%, 63%, 65%, 66%, 67%, 68%, 69%, 70%, 71%, 72%, 73%, 74%, 75%, 76%, 77%, 78%, 79%, 80%, 81%, 82%, 83%, 84%, 85%, 86%, 87%, 88%, 89%, 90%, 91%, 92%, 93%, 94%, 95%, 96%, 97%, 98%, 99% or 100%. The variable targeting domain can be at least 12, 13, 14, 15, 16, 17, 18, 19, 20, 21, 22, 23, 24, 25, 26, 27, 28, 29 or 30 nucleotides in length.

[0097] In some embodiments, the variable targeting domain comprises a contiguous stretch of 12 to 30, 12 to 29, 12 to 28, 12 to 27, 12 to 26, 12 to 25, 12 to 26, 12 to 25, 12 to 24, 12 to 23, 12 to 22, 12 to 21, 12 to 20, 12 to 19, 12 to 18, 12 to 17, 12 to 16, 12 to 15, 12 to 14, 12 to 13, 13 to 30, 13 to 29, 13 to 28, 13 to 27, 13 to 26, 13 to 25, 13 to 26, 13 to 25, 13 to 24, 13 to 23, 13 to 22, 13 to 21, 13 to 20, 13 to 19, 13 to 18, 13 to 17, 13 to 16, 13 to 15, 13 to 14, 14 to 30, 14 to 29, 14 to 28, 14 to 27, 14 to 26, 14 to 25, 14 to 26, 14 to 25, 14 to 24, 14 to 23, 14 to 22, 14 to 21, 14 to 20, 14 to 19, 14 to 18, 14 to 17, 14 to 16, 14 to 15, 15 to 30, 15 to 29, 15 to 28, 15 to 27, 15 to 26, 15 to 25, 15 to 26, 15 to 25, 15 to 24, 15 to 23, 15 to 22, 15 to 21, 15 to 20, 15 to 19, 15 to 18, 15 to 17, 15 to 16, 16 to 30, 16 to 29, 16 to 28, 16 to 27, 16 to 26, 16 to 25, 16 to 24, 16 to 23, 16 to 22, 16 to 21, 16 to 20, 16 to 19, 16 to 18, 16 to 17, 17 to 30, 17 to 29, 17 to 28, 17 to 27, 17 to 26, 17 to 25, 17 to 24, 17 to 23, 17 to 22, 17 to 21, 17 to 20, 17 to 19, 17 to 18, 18 to 30, 18 to 29, 18 to 28, 18 to 27, 18 to 26, 18 to 25, 18 to 24, 18 to 23, 18 to 22, 18 to 21, 18 to 20, 18 to 19, 19 to 30, 19 to 29, 19 to 28, 19 to 27, 19 to 26, 19 to 25, 19 to 24, 19 to 23, 19 to 22, 19 to 21, 19 to 20, 20 to 30, 20 to 29, 20 to 28, 20 to 27, 20 to 26, 20 to 25, 20 to 24, 20 to 23, 20 to 22, 20 to 21, 21 to 30, 21 to 29, 21 to 28, 21 to 27, 21 to 26, 21 to 25, 21 to 24, 21 to 23, 21 to 22, 22 to 30, 22 to 29, 22 to 28, 22 to 27, 22 to 26, 22 to 25, 22 to 24, 22 to 23, 23 to 30, 23 to 29, 23 to 28, 23 to 27, 23 to 26, 23 to 25, 23 to 24, 24 to 30, 24 to 29, 24 to 28, 24 to 27, 24 to 26, 24 to 25, 25 to 30, 25 to 29, 25 to 28, 25 to 27, 25 to 26, 26 to 30, 26 to 29, 26 to 28 nucleotides.

[0098] The variable targeting domain can be composed of a DNA sequence, a RNA sequence, a modified DNA sequence, a modified RNA sequence, or any combination thereof.

[0099] The term “Cas endonuclease recognition domain” or “CER domain” (of a guide polynucleotide) is used interchangeably herein and includes a nucleotide sequence that interacts with a Cas9 endonuclease polypeptide. A CER domain comprises a tracrNucleotide mate sequence followed by a tracrNucleotide sequence. The CER domain can be composed of a DNA sequence, a RNA sequence, a modified DNA sequence, a modified RNA sequence (see for example US 2015-0059010 A1, published on Feb. 26, 2015, incorporated in its entirety by reference herein), or any combination thereof.

[0100] The nucleotide sequence linking the crNucleotide and the tracrNucleotide of a single guide polynucleotide can comprise a RNA sequence, a DNA sequence, or a RNA-DNA combination sequence. In one embodiment, the nucleotide sequence linking the crNucleotide and the tracrNucleotide of a single guide polynucleotide (also referred to as loop) can be at least 3, 4, 5, 6, 7, 8, 9, 10, 11, 12, 13, 14, 15, 16, 17, 18, 19, 20, 21, 22, 23, 24, 25, 26, 27, 28, 29, 30, 31, 32, 33, 34, 35, 36, 37, 38, 39, 40, 41, 42, 43, 44, 45, 46, 47, 48, 49, 50, 51, 52, 53, 54, 55, 56, 57, 58, 59, 60, 61, 62, 63, 64, 65, 66, 67, 68, 69, 70, 71, 72, 73, 74, 75, 76, 77, 78, 78, 79, 80, 81, 82, 83, 84, 85, 86, 87, 88, 89, 90, 91, 92, 93, 94, 95, 96, 97, 98, 99 or 100 nucleotides in length. In some embodiments, the loop can be 3-4, 3-5, 3-6, 3-7, 3-8, 3-9, 3-10, 3-11, 3-12, 3-13, 3-14, 3-15, 3-20, 3-30, 3-40, 3-50, 3-60, 3-70, 3-80, 3-90, 3-100, 4-5, 4-6, 4-7, 4-8, 4-9, 4-10, 4-11, 4-12, 4-13, 4-14, 4-15, 4-20, 4-30, 4-40, 4-50, 4-60, 4-70, 4-80, 4-90, 4-100, 5-6, 5-7, 5-8, 5-9, 5-10, 5-11, 5-12, 5-13, 5-14, 5-15, 5-20, 5-30, 5-40, 5-50, 5-60, 5-70, 5-80, 5-90, 5-100, 6-7, 6-8, 6-9, 6-10, 6-11, 6-12, 6-13, 6-14, 6-15, 6-20, 6-30, 6-40, 6-50, 6-60, 6-70, 6-80, 6-90, 6-100, 7-8, 7-9, 7-10, 7-11, 7-12, 7-13, 7-14, 7-15, 7-20, 7-30, 7-40, 7-50, 7-60, 7-70, 7-80, 7-90, 7-100, 8-9, 8-10, 8-11, 8-12, 8-13, 8-14, 8-15, 8-20, 8-30, 8-40, 8-50, 8-60, 8-70, 8-80, 8-90, 8-100, 9-10, 9-11, 9-12, 9-13, 9-14, 9-15, 9-20, 9-30, 9-40, 9-50, 9-60, 9-70, 9-80, 9-90, 9-100, 10-20, 20-30, 30-40, 40-50, 50-60, 70-80, 80-90 or 90-100 nucleotides in length.

[0101] In one embodiment, the nucleotide sequence linking the crNucleotide and the tracrNucleotide of a single guide polynucleotide can comprise a tetraloop sequence, such as, but not limiting to a GAAA tetraloop sequence.

[0102] The guide polynucleotide can be produced by any method known in the art, including chemically synthesizing guide polynucleotides (such as but not limiting to Hendel et al. 2015, Nature Biotechnology 33, 985-989), in vitro generated guide polynucleotides, and/or self-splicing guide RNAs (such as but not limiting to Xie et al. 2015, PNAS 112:3570-3575).

[0103] A method of expressing RNA components such as gRNA in eukaryotic cells for performing Cas9-mediated DNA targeting has been to use RNA polymerase III (Pol III) promoters, which allow for transcription of RNA with precisely defined, unmodified, 5′- and 3′-ends (DiCarlo et al., Nucleic Acids Res. 41: 4336-4343; Ma et al., Mol. Ther. Nucleic Acids 3:e161). This strategy has been successfully applied in cells of several different species including maize and soybean (US 20150082478, published on Mar. 19, 2015). Methods for expressing RNA components that do not have a 5′ cap have been described (WO 2016/025131, published on Feb. 18, 2016).

[0104] In some embodiments, a subject nucleic acid (e.g., a guide polynucleotide, a nucleic acid comprising a nucleotide sequence encoding a guide polynucleotide; a nucleic acid encoding Cas9 endonuclease of the present disclosure; a crRNA or a nucleotide encoding a crRNA, a tracrRNA or a nucleotide encoding a tracrRNA, a nucleotide encoding a VT domain, a nucleotide encoding a CER domain, etc.) comprises a modification or sequence that provides for an additional desirable feature (e.g., modified or regulated stability; subcellular targeting; tracking, e.g., a fluorescent label; a binding site for a protein or protein complex; etc.). Nucleotide sequence modification of the guide polynucleotide, VT domain and/or CER domain can be selected from, but not limited to, the group consisting of a 5′ cap, a 3′ polyadenylated tail, a riboswitch sequence, a stability control sequence, a sequence that forms a dsRNA duplex, a modification or sequence that targets the guide poly nucleotide to a subcellular location, a modification or sequence that provides for tracking, a modification or sequence that provides a binding site for proteins, a Locked Nucleic Acid (LNA), a 5-methyl dC nucleotide, a 2,6-Diaminopurine nucleotide, a 2′-Fluoro A nucleotide, a 2′-Fluoro U nucleotide; a 2′-O-Methyl RNA nucleotide, a phosphorothioate bond, linkage to a cholesterol molecule, linkage to a polyethylene glycol molecule, linkage to a spacer 18 molecule, a 5′ to 3′ covalent linkage, or any combination thereof. These modifications can result in at least one additional beneficial feature, wherein the additional beneficial feature is selected from the group of a modified or regulated stability, a subcellular targeting, tracking, a fluorescent label, a binding site for a protein or protein complex, modified binding affinity to complementary target sequence, modified resistance to cellular degradation, and increased cellular permeability.

[0105] In one embodiment of the disclosure, the composition comprises at least one a single guide RNA capable of forming a guide RNA/Cas9 endonuclease complex, wherein said guide RNA/Cas9 endonuclease complex can recognize, bind to, and optionally nick or cleave a target sequence, wherein said single guide RNA is selected from the group consisting of SEQ ID NOs: 185-207, a functional fragment of SEQ ID NOs: 185-207, and a functional variant of SEQ ID NOs: 185-207.

[0106] In one embodiment of the disclosure, the composition is a single guide RNA capable of forming a guide RNA/Cas9 endonuclease complex, wherein said guide RNA/Cas9 endonuclease complex can recognize, bind to, and optionally nick or cleave a target sequence, wherein said single guide RNA comprises a chimeric non-naturally occurring crRNA linked to a tracrRNA, wherein said tracrRNA comprises a nucleotide sequence selected from the group consisting of SEQ ID NOs: 139-184, a functional fragment of SEQ ID NOs: 139-184, and a functional variant of SEQ ID NOs: 139-184.

[0107] The guide RNA can also be a dual molecule comprising a chimeric non-naturally occurring crRNA linked to a tracrRNA, wherein said chimeric non-naturally occurring crRNA comprises a nucleotide sequence selected from the group consisting of SEQ ID NOs: 116-138, a functional fragment of SEQ ID NOs: 116-138, and a functional variant of SEQ ID NOs: 116-138, and/or wherein said tracrRNA comprises a nucleotide sequence selected from the group consisting of SEQ ID NOs: 139-184, a functional fragment of SEQ ID NOs: 139-184, and a functional variant of SEQ ID NOs: 139-184.

[0108] In one embodiment of the disclosure, the composition is a single guide RNA capable of forming a guide RNA/Cas9 endonuclease complex, wherein said guide RNA/Cas9 endonuclease complex can recognize, bind to, and optionally nick or cleave a target sequence, wherein said single guide RNA comprises a chimeric non-naturally occurring crRNA linked to a tracrRNA, wherein said chimeric non-naturally occurring crRNA comprises a nucleotide sequence selected from the group consisting of SEQ ID NOs: 116-138, a functional fragment of SEQ ID NOs: 116-138, and a functional variant of SEQ ID NOs: 116-138.

[0109] Single guide RNAs targeting a target site in the genome of an organism can be designed by changing Variable Targeting Domain (VT) of any one of SEQ ID NOs: 185-207 (or a functional fragment of SEQ ID NOs: 185-207, or a functional variant of SEQ ID NOs: 185-207) with any random nucleotide that can hybridize to any desired target sequence. In SEQ ID NOs: 185-207 the sgRNA comprises a VT domain of 20 Ns. As described herein, the variable targeting domain can be at least 12, 13, 14, 15, 16, 17, 18, 19, 20, 21, 22, 23, 24, 25, 26, 27, 28, 29 or 30 nucleotides in length. The VT domain of these sgRNAs can include

[0110] The terms “functional fragment ”, “fragment that is functionally equivalent” and “functionally equivalent fragment” of a single guide RNA, crRNA or tracrRNA are used interchangeably herein, and refer to a portion or subsequence of the single guide RNA, crRNA or tracrRNA, respectively, of the present disclosure in which the ability to function as a guide RNA, crRNA or tracrRNA, respectively, is retained.

[0111] A functional fragments of a guide RNA (guide polynucleotide) of the present disclosure include a fragment of 20-40, 20-45, 20-50, 20-55, 20-60, 20-65, 20-70, 20-75, 20-80, 25-40, 25-45, 25-50, 25-55, 25-60, 25-65, 25-70, 25-75, 25-80, 30-40, 30-45, 30-50, 30-55, 30-60, 30-65, 30-70, 30-75, 30-80, 35-40, 35-45, 35-50, 35-55, 35-60, 35-65, 35-70, 35-75, 35-80, 40-45, 40-50, 40-55, 40-60, 40-65, 40-70, 40-75, 40-80, 45-50, 45-55, 45-60, 45-65, 45-70, 45-75, 45-80, 50-55, 50-60, 50-65, 50-70, 50-75, 50-80, 55-55, 55-60, 55-65, 55-70, 55-75, 55-80, 60-65, 60-70, 60-75, 60-80, 65-70, 65-75, 65-80, 70-75, 70-80 or 75-80 nucleotides of a reference guide RNA, such as the reference guide RNAs of SEQ ID NOs: 185-207.

[0112] Functional fragments of a crRNA of the present disclosure include a fragment of 5-30, 10-30, 15-30, 20-30, 25-30, 5-25, 10-25, 15-25, 20-25, 5-20, 10-20, 15-20, 5-15, 10-15, nucleotides of a reference crRNA, such as the reference crRNAs of SEQ ID NOs: 116-138.

[0113] The terms “functional variant”, “Variant that is functionally equivalent” and “functionally equivalent variant” of a guide RNA, crRNA or tracrRNA (respectively) are used interchangeably herein, and refer to a variant of the guide RNA, crRNA or tracrRNA, respectively, of the present disclosure in which the ability to function as a guide RNA, crRNA or tracrRNA, respectively, is retained. A functional variant of a single guide RNA may comprise a nucleotide sequence that is at least about 80%, 81%, 82%, 83%, 84%, 85%, 86%, 87%, 88%, 89%, 90%, 91%, 92%, 93%, 94%, 95%, 96%, 97%, 98%, or 99% identical to reference single guide RNA, such as the reference single guide RNA of SEQ ID NOs:185-207, described herein. In some embodiments, a functional variant of a single guide RNA comprises a nucleotide sequence having at least about 60%, at least about 65%, at least about 70%, at least about 75%, at least about 80%, at least about 85%, at least about 90%, at least about 95%, at least about 98%, at least about 99%, or 100% nucleotide sequence identity over a stretch of at least 8, 9, 10, 11, 12, 13, 14, 15, 16, 17, 18, 19, 20, 21, 22, 23, 24, 25, 26, 27, 28, 29, 30 contiguous nucleotides to any one of the nucleotide sequences set forth in SEQ ID NOs: 185-207.

[0114] Functional variants of a guide polynucleotide of the present disclosure can comprise a modified guide polynucleotide wherein the modification comprises an engineered secondary structure, and/or an artificial loop, and/or a reduction in the length and/or degree of complementation in a region of hybridization compared to a region of hybridization of a reference guide polynucleotide, including the guide polynucleotides of SEQ ID NOs: 185-207, and/or a reduction in the length and/or degree of complementation in the portion of the protein-binding segment that forms a double stranded RNA duplex.

[0115] Functional variants of a guide polynucleotide of the present disclosure can comprise a modified guide polynucleotide wherein the modification comprises adding, removing, or otherwise altering loops and/or hairpins in the single guide RNA.

[0116] Functional variants of a guide polynucleotide of the present disclosure can comprise a modified guide polynucleotide wherein the modification comprises one or more modified nucleotides in the nucleotide sequence, wherein the one or more modified nucleotides comprises at least one non-naturally-occurring nucleotide, nucleotide mimetic (as described in US application US2014/0068797, published Mar. 6, 2014), or analog thereof, or wherein the one or more modified nucleotides are selected from the group consisting of 2′-0-methylanalogs, 2′-fluoro analogs 2-aminopurine, 5-bromo-uridine, pseudouridine, and 7-methylguanosine.

[0117] In one aspect, the functional variant of the guide RNA can form a guide RNA/Cas9 endonuclease complex that can recognize, bind to, and optionally nick or cleave a target sequence.

[0118] A functional variant of a crRNA may comprise an nucleotide sequence that is at least about 80%, 81%, 82%, 83%, 84%, 85%, 86%, 87%, 88%, 89%, 90%, 91%, 92%, 93%, 94%, 95%, 96%, 97%, 98%, or 99% identical to a reference crRNA, such as the reference crRNA of SEQ ID NOs:116-138, described herein. In one aspect, the functional variant of the crRNA can bind to a Cas9 endonuclease described herein and together with a tracrRNA, or as part of a guide RNA, can form a guide RNA/Cas9 endonuclease complex that can recognize, bind to, and optionally nick or cleave a target sequence.

[0119] A functional variant of a tracrRNA may comprise an nucleotide sequence that is at least about 80%, 81%, 82%, 83%, 84%, 85%, 86%, 87%, 88%, 89%, 90%, 91%, 92%, 93%, 94%, 95%, 96%, 97%, 98%, or 99% identical to a reference tracrRNA, such as the reference tracrRNA comprising a nucleotide sequence selected from the group consisting of SEQ ID NOs:139-184, described herein. In one aspect, the functional variant of the tracrRNA can bind to a Cas9 endonuclease described herein and together with a crRNA, or as part of a guide RNA, can form a guide RNA/Cas9 endonuclease complex that can recognize, bind to, and optionally nick or cleave a target sequence.

[0120] Methods for determining if fragments or variants of a guide RNA, crRNA or tracrRNA are functional include methods that measure the Cas9 endonuclease activity when in complex with said fragment/variant guide RNA, crRNA and/or tracrRNA, as described herein. Methods for measuring Cas9 endonuclease activity (either double strand breaks or single strand breaks) include methods that measure the mutation frequency at a target site, as described herein. If mutations are observed at the intended target sites when using a fragment or variant of guide RNA, crRNA and/or tracrRNA of the present disclosure, in complex with a cas9 endonuclease of the present disclosure, the fragments or variants are functional.

[0121] The terms “single guide RNA” and “sgRNA” are used interchangeably herein and relate to a synthetic fusion of two RNA molecules, a crRNA (CRISPR RNA) comprising a variable targeting domain (linked to a tracr mate sequence that hybridizes to a tracrRNA), fused to a tracrRNA (trans-activating CRISPR RNA). The single guide RNA can comprise a crRNA or crRNA fragment and a tracrRNA or tracrRNA fragment of the type II CRISPR/Cas9 system that can form a complex with a type II Cas9 endonuclease, wherein said guide RNA/Cas9 endonuclease complex can direct the Cas9 endonuclease to a DNA target site, enabling the Cas9 endonuclease to recognize, bind to, and optionally nick or cleave (introduce a single or double strand break) the DNA target site.

[0122] Single guide RNAs targeting a target site in the genome of an organism can be designed by changing the Variable Targeting Domain (VT) of anyone of SEQ ID NOs: 185-207 (or a functional fragment or functional variant of SEQ ID NOs: 185-207) with any random nucleotide that can hybridize to any desired target sequence.

[0123] The terms “guide RNA/Cas9 endonuclease complex”, “guide RNA/Cas9 endonuclease system”, “guide RNA/Cas9 complex”, “guide RNA/Cas9 system”, “gRNA/Cas9 complex”, “gRNA/Cas9 system”, “RNA-guided endonuclease”, “RGEN” are used interchangeably herein and refer to at least one RNA component and at least one Cas9 endonuclease that are capable of forming a complex, wherein said guide RNA/Cas9 endonuclease complex can direct the Cas9 endonuclease to a DNA target site, enabling the Cas9 endonuclease to recognize, bind to, and optionally nick or cleave (introduce a single or double strand break) the DNA target site. A guide RNA/Cas9 endonuclease complex herein can comprise Cas9 protein(s) and suitable RNA component(s) of any of the four known CRISPR systems (Horvath and Barrangou, 2010, Science 327:167-170) such as a type I, II, or III CRISPR system. A guide RNA/Cas9 endonuclease complex can comprise a Type II Cas9 endonuclease and at least one RNA component (e.g., a crRNA and tracrRNA, or a gRNA). (See also U.S. Patent Application US 2015-0082478 A1, published on Mar. 19, 2015 and US 2015-0059010 A1, published on Feb. 26, 2015, both are hereby incorporated in its entirety by reference).

[0124] The guide polynucleotide can be introduced into a cell transiently, as single stranded polynucleotide or a double stranded polynucleotide, using any method known in the art such as, but not limited to, particle bombardment, Agrobacterium transformation or topical applications. The guide polynucleotide can also be introduced indirectly into a cell by introducing a recombinant DNA molecule (via methods such as, but not limited to, particle bombardment or Agrobacterium transformation) comprising a heterologous nucleic acid fragment encoding a guide polynucleotide, operably linked to a specific promoter that is capable of transcribing the guide RNA in said cell. The specific promoter can be, but is not limited to, a RNA polymerase III promoter, which allow for transcription of RNA with precisely defined, unmodified, 5′- and 3′-ends (DiCarlo et al., Nucleic Acids Res. 41: 4336-4343; Ma et al., Mol. Ther. Nucleic Acids 3:e161) as described in U.S. application 62/036,652, filed on Aug. 13, 2014, incorporated herein in its entirety by reference.

[0125] Direct delivery of a polynucleotide modification template into plant cells can be achieved through particle mediated delivery, and any other direct method of delivery, such as but not limiting to, polyethylene glycol (PEG)-mediated transfection to protoplasts, whiskers mediated transformation, electroporation, particle bombardment, cell-penetrating peptides, or mesoporous silica nanoparticle (MSN)-mediated direct protein delivery can be successfully used for delivering a polynucleotide modification template in eukaryotic cells, such as plant cells.

[0126] The donor DNA can be introduced by any means known in the art. The donor DNA may be provided by any transformation method known in the art including, for example, Agrobacterium-mediated transformation or biolistic particle bombardment. The donor DNA may be present transiently in the cell or it could be introduced via a viral replicon. In the presence of the Cas9 endonuclease and the target site, the donor DNA is inserted into the transformed plant's genome.

[0127] Direct delivery of any one of the guided Cas9 system components can be accompanied by direct delivery (co-delivery) of other mRNAs that can promote the enrichment and/or visualization of cells receiving the guide polynucleotide/Cas9 endonuclease complex components. For example, direct co-delivery of the guide polynucleotide/Cas9 endonuclease components (and/or guide polynucleotide/Cas9 endonuclease complex itself) together with mRNA encoding phenotypic markers (such as but not limiting to transcriptional activators such as CRC (Bruce et al. 2000 The Plant Cell 12:65-79) can enable the selection and enrichment of cells without the use of an exogenous selectable marker by restoring function to a non-functional gene product as described in PCT/US16/57272 filed Oct. 17, 2016 and PCT/US16/57279, filed Oct. 17, 2016, both incorporated herein by reference.

[0128] In one aspect, the guide polynucleotide/Cas9 endonuclease complex of the present disclosure comprises a guide RNA of the present disclosure (such as a single guide RNA selected from the group consisting of SEQ ID NOs: 185-207, a functional fragment of SEQ ID NOs: 185-207, and a functional variant of SEQ ID NOs: 185-207) in complex with a Cas9 endonuclease of the present disclosure (such as a Cas9 endonuclease selected from the group consisting of SEQ ID NOs: 47-69, a functional fragment of SEQ ID NOs: 47-69, and a functional variant of SEQ ID NOs: 47-69).

[0129] The terms “target site”, “target sequence”, “target site sequence, “target DNA”, “target locus”, “genomic target site”, “genomic target sequence”, “genomic target locus” and “protospacer”, are used interchangeably herein and refer to a polynucleotide sequence such as, but not limited to, a nucleotide sequence on a chromosome, episome, or any other DNA molecule in the genome (including chromosomal, choloroplastic, mitochondrial DNA, plasmid DNA) of a cell, at which a guide polynucleotide/Cas9 endonuclease complex can recognize, bind to, and optionally nick or cleave. The target site can be an endogenous site in the genome of a cell, or alternatively, the target site can be heterologous to the cell and thereby not be naturally occurring in the genome of the cell, or the target site can be found in a heterologous genomic location compared to where it occurs in nature. As used herein, terms “endogenous target sequence” and “native target sequence” are used interchangeable herein to refer to a target sequence that is endogenous or native to the genome of a cell and is at the endogenous or native position of that target sequence in the genome of the cell. Cells include, but are not limited to, human, non-human, animal, bacterial, fungal, insect, yeast, non-conventional yeast, and plant cells as well as plants and seeds produced by the methods described herein. An “artificial target site” or “artificial target sequence” are used interchangeably herein and refer to a target sequence that has been introduced into the genome of a cell. Such an artificial target sequence can be identical in sequence to an endogenous or native target sequence in the genome of a cell but be located in a different position (i.e., a non-endogenous or non-native position) in the genome of a cell.

[0130] An “altered target site”, “altered target sequence”, “modified target site”, “modified target sequence” are used interchangeably herein and refer to a target sequence as disclosed herein that comprises at least one alteration when compared to non-altered target sequence. Such “alterations” include, for example: (i) replacement of at least one nucleotide, (ii) a deletion of at least one nucleotide, (iii) an insertion of at least one nucleotide, or (iv) any combination of (i)-(iii).

[0131] Methods for “modifying a target site” and “altering a target site” are used interchangeably herein and refer to methods for producing an altered target site.

[0132] The length of the target DNA sequence (target site) can vary, and includes, for example, target sites that are at least 12, 13, 14, 15, 16, 17, 18, 19, 20, 21, 22, 23, 24, 25, 26, 27, 28, 29, 30 or more nucleotides in length. It is further possible that the target site can be palindromic, that is, the sequence on one strand reads the same in the opposite direction on the complementary strand. The nick/cleavage site can be within the target sequence or the nick/cleavage site could be outside of the target sequence. In another variation, the cleavage could occur at nucleotide positions immediately opposite each other to produce a blunt end cut or, in other cases, the incisions could be staggered to produce single-stranded overhangs, also called “sticky ends”, which can be either 5′ overhangs, or 3′ overhangs. Active variants of genomic target sites can also be used. Such active variants can comprise at least 65%, 70%, 75%, 80%, 85%, 90%, 91%, 92%, 93%, 94%, 95%, 96%, 97%, 98%, 99% or more sequence identity to the given target site, wherein the active variants retain biological activity and hence are capable of being recognized and cleaved by an Cas9 endonuclease. Assays to measure the single or double-strand break of a target site by an endonuclease are known in the art and generally measure the overall activity and specificity of the agent on DNA substrates containing recognition sites.

[0133] A “protospacer adjacent motif” (PAM) herein refers to a short nucleotide sequence adjacent to a target sequence (protospacer) that is recognized (targeted) by a guide polynucleotide/Cas9 endonuclease system described herein. The Cas9 endonuclease may not successfully recognize a target DNA sequence if the target DNA sequence is not followed by a PAM sequence. The sequence and length of a PAM herein can differ depending on the Cas9 protein or Cas9 protein complex used. The PAM sequence can be of any length but is typically 1, 2, 3, 4, 5, 6, 7, 8, 9, 10, 11, 12, 13, 14, 15, 16, 17, 18, 19 or 20 nucleotides long.

[0134] A “randomized PAM” and “randomized protospacer adjacent motif” are used interchangeably herein, and refer to a random DNA sequence adjacent to a target sequence (protospacer) that is recognized (targeted) by a guide polynucleotide/Cas9 endonuclease system described herein. The randomized PAM sequence can be of any length but is typically 1, 2, 3, 4, 5, 6, 7, 8, 9, 10, 11, 12, 13, 14, 15, 16, 17, 18, 19 or 20 nucleotides long. A randomized nucleotide includes anyone of the nucleotides A, C, G or T.

[0135] Given the diversity of Type II CRISPR-Cas systems (Fonfara et al. (2014) Nucleic Acids Res. 42:2577-2590), it is plausible that many of the Cas9 endonucleases and cognate guide RNAs may have unique sequence recognition and enzymatic properties different from those previously described or characterized. For example, cleavage activity and specificity may be enhanced or proto-spacer adjacent motif (PAM) sequence may be different leading to increased genomic target site density. To tap into this vast unexplored diversity and expand the repertoire of Cas9 endonucleases and cognate guide RNAs available for genome targeting, the components of Cas9 target site recognition, the PAM sequence and the guide RNA (either duplexed CRISPR RNA (crRNA) and trans-activating CRISPR RNA (tracrRNA) or chimeric fusion of crRNA and tracrRNA (single guide RNA (sgRNA), need to be established for each new system. As described herein, CRISPR-Cas loci (including Cas9 genes and open reading frames, CRISPR array and anti-repeats) from uncharacterized CRISPR-Cas systems were identified by searching internal Pioneer-DuPont databases consisting of microbial genomes. The Cas9 endonuclease described herein can be expressed and purified by methods known in the art. As described herein, the transcriptional direction of the tracrRNA for all the CRISPR-Cas systems can be deduced (as described in PCT/US16/32028 filed May 12, 2016, and PCT/US16/32073 filed May 12, 2016), and examples of sgRNAs (described herein, see SEQ ID NOs:185-207) and its components (VT, crRNA repeat, loop, anti-repeat and 3′tracrRNA) were identified for each new CRISPR-Cas endonuclease described herein.

[0136] The terms “targeting”, “gene targeting” and “DNA targeting” are used interchangeably herein. DNA targeting herein may be the specific introduction of a knock-out, edit, or knock-in at a particular DNA sequence, such as in a chromosome or plasmid of a cell. In general, DNA targeting can be performed herein by cleaving one or both strands at a specific DNA sequence in a cell with an endonuclease associated with a suitable polynucleotide component. Such DNA cleavage, if a double-strand break (DSB) can prompt NHEJ or HDR processes which can lead to modifications at the target site.

[0137] A targeting method herein can be performed in such a way that two or more DNA target sites are targeted in the method, for example. Such a method can optionally be characterized as a multiplex method. Two, three, four, five, six, seven, eight, nine, ten, or more target sites can be targeted at the same time in certain embodiments. A multiplex method is typically performed by a targeting method herein in which multiple different RNA components are provided, each designed to guide a guide polynucleotide/Cas9 endonuclease complex to a unique DNA target site.

[0138] The terms “knock-out”, “gene knock-out” and “genetic knock-out” are used interchangeably herein. A knock-out represents a DNA sequence of a cell that has been rendered partially or completely inoperative by targeting with a Cas9 protein; such a DNA sequence prior to knock-out could have encoded an amino acid sequence, or could have had a regulatory function (e.g., promoter), for example. A knock-out may be produced by an indel (insertion or deletion of nucleotide bases in a target DNA sequence through NHEJ), or by specific removal of sequence that reduces or completely destroys the function of sequence at or near the targeting site.

[0139] In one embodiment of the disclosure, the method comprises a method for modifying a target site in the genome of a cell, the method comprising introducing into said cell at least one guide RNA and at least one Cas9 endonuclease selected from the group consisting of SEQ ID NOs: 47-69, a functional fragment of SEQ ID NOs: 47-69, and a functional variant of SEQ ID NOs: 47-69, wherein said guide RNA and Cas9 endonuclease can form a complex that is capable of recognizing, binding to, and optionally nicking or cleaving all or part of said target site. The method can further comprise identifying at least one cell that has a modification at said target, wherein the modification at said target site is selected from the group consisting of (i) a replacement of at least one nucleotide, (ii) a deletion of at least one nucleotide, (iii) an insertion of at least one nucleotide, and (iv) any combination of (i)-(iii).

[0140] The guide polynucleotide/Cas9 endonuclease system can be used in combination with a co-delivered polynucleotide modification template to allow for editing (modification) of a genomic nucleotide sequence of interest. (See also U.S. Patent Application US 2015-0082478 A1, published on Mar. 19, 2015 and WO2015/026886 A1, published on Feb. 26, 2015, both are hereby incorporated in its entirety by reference.)

[0141] A “modified nucleotide” or “edited nucleotide” refers to a nucleotide sequence of interest that comprises at least one alteration when compared to its non-modified nucleotide sequence. Such “alterations” include, for example: (i) replacement of at least one nucleotide, (ii) a deletion of at least one nucleotide, (iii) an insertion of at least one nucleotide, or (iv) any combination of (i)-(iii).

[0142] The term “polynucleotide modification template” includes a polynucleotide that comprises at least one nucleotide modification when compared to the nucleotide sequence to be edited. A nucleotide modification can be at least one nucleotide substitution, addition or deletion. Optionally, the polynucleotide modification template can further comprise homologous nucleotide sequences flanking the at least one nucleotide modification, wherein the flanking homologous nucleotide sequences provide sufficient homology to the desired nucleotide sequence to be edited.

[0143] In one embodiment, the disclosure describes a method for editing a nucleotide sequence in the genome of a cell, the method comprising introducing into said cell a polynucleotide modification template, at least one guide RNA and at least one Cas9 endonuclease selected from the group consisting of SEQ ID NOs: 47-69, a functional fragment of SEQ ID NOs: 47-69, and a functional variant of SEQ ID NOs: 47-69, wherein said polynucleotide modification template comprises at least one nucleotide modification of said nucleotide sequence, wherein said guide RNA and Cas9 endonuclease can form a complex that is capable of recognizing, binding to, and optionally nicking or cleaving all or part of said target site.

[0144] Cells include, but are not limited to, human, non-human, animal, bacterial, fungal, insect, yeast, non-conventional yeast, and plant cells as well as plants and seeds produced by the methods described herein. Plant cells include cells selected from the group consisting of maize, rice, sorghum, rye, barley, wheat, millet, oats, sugarcane, turfgrass, or switchgrass, soybean, canola, alfalfa, sunflower, cotton, tobacco, peanut, potato, tobacco, Arabidopsis, and safflower cells. The nucleotide to be edited can be located within or outside a target site recognized and cleaved by a Cas9 endonuclease.

[0145] In one embodiment, the at least one nucleotide modification is not a modification at a target site recognized and cleaved by a Cas9 endonuclease. In another embodiment, the nucleotide modification is located in close proximity to the target site. In another embodiment, there are at least 1, 2, 3, 4, 5, 6, 7, 8, 9, 10, 11, 12, 13, 14, 15, 16, 17, 18, 19, 20, 21, 22, 23, 24, 25, 26, 27, 30, 40, 50, 100, 200, 300, 400, 500, 600, 700, 900 or 1000 nucleotides between the at least one nucleotide to be edited and the genomic target site.

[0146] Genome editing can be accomplished using any method of gene editing available. For example, gene editing can be accomplished through the introduction into a host cell of a polynucleotide modification template (sometimes also referred to as a gene repair oligonucleotide) containing a targeted modification to a gene within the genome of the host cell. The polynucleotide modification template for use in such methods can be either single-stranded or double-stranded. Examples of such methods are generally described, for example, in US Publication No. 2013/0019349.

[0147] In some embodiments, gene editing may be facilitated through the induction of a double-stranded break (DSB) in a defined position in the genome near the desired alteration. DSBs can be induced using any DSB-inducing agent available, including, but not limited to, TALENs, meganucleases, zinc finger nucleases, Cas9-gRNA systems (based on bacterial CRISPR-Cas systems), and the like. In some embodiments, the introduction of a DSB can be combined with the introduction of a polynucleotide modification template.

[0148] The process for editing a genomic sequence combining DSB and modification templates generally comprises: introducing into a host cell, a DSB-inducing agent, or a nucleic acid encoding a DSB-inducing agent, that recognizes a target sequence in the chromosomal sequence and is able to induce a DSB in the genomic sequence, and at least one polynucleotide modification template comprising at least one nucleotide alteration when compared to the nucleotide sequence to be edited. The polynucleotide modification template can further comprise nucleotide sequences flanking the at least one nucleotide alteration, in which the flanking sequences are substantially homologous to the chromosomal region flanking the DSB. Genome editing using DSB-inducing agents, such as Cas9-gRNA complexes, has been described, for example in U.S. Patent Application US 2015-0082478 A1, published on Mar. 19, 2015, WO2015/026886 A1, published on Feb. 26, 2015, U.S. application 62/023,246, filed on Jul. 7, 2014, and U.S. application 62/036,652, filed on Aug. 13, 2014, all of which are incorporated by reference herein.

[0149] The terms “knock-in”, “gene knock-in, “gene insertion” and “genetic knock-in” are used interchangeably herein. A knock-in represents the replacement or insertion of a DNA sequence at a specific DNA sequence in cell by targeting with a Cas9 protein (by HR, wherein a suitable donor DNA polynucleotide is also used). Examples of knock-ins are a specific insertion of a heterologous amino acid coding sequence in a coding region of a gene, or a specific insertion of a transcriptional regulatory element in a genetic locus.

[0150] Various methods and compositions can be employed to obtain a cell or organism having a polynucleotide of interest inserted in a target site for a Cas9 endonuclease. Such methods can employ homologous recombination to provide integration of the polynucleotide of Interest at the target site. In one method provided, a polynucleotide of interest is introduced into the organism cell in a donor DNA construct. As used herein, “donor DNA” is a DNA construct that comprises a polynucleotide of Interest to be inserted into the target site of a Cas9 endonuclease. The donor DNA construct further comprises a first and a second region of homology that flank the polynucleotide of Interest. The first and second regions of homology of the donor DNA share homology to a first and a second genomic region, respectively, present in or flanking the target site of the cell or organism genome. By “homology” is meant DNA sequences that are similar. For example, a “region of homology to a genomic region” that is found on the donor DNA is a region of DNA that has a similar sequence to a given “genomic region” in the cell or organism genome. A region of homology can be of any length that is sufficient to promote homologous recombination at the cleaved target site. For example, the region of homology can comprise at least 5-10, 5-15, 5-20, 5-25, 5-30, 5-35, 5-40, 5-45, 5-50, 5-55, 5-60, 5-65, 5-70, 5-75, 5-80, 5-85, 5-90, 5-95, 5-100, 5-200, 5-300, 5-400, 5-500, 5-600, 5-700, 5-800, 5-900, 5-1000, 5-1100, 5-1200, 5-1300, 5-1400, 5-1500, 5-1600, 5-1700, 5-1800, 5-1900, 5-2000, 5-2100, 5-2200, 5-2300, 5-2400, 5-2500, 5-2600, 5-2700, 5-2800, 5-2900, 5-3000, 5-3100 or more bases in length such that the region of homology has sufficient homology to undergo homologous recombination with the corresponding genomic region. “Sufficient homology” indicates that two polynucleotide sequences have sufficient structural similarity to act as substrates for a homologous recombination reaction. The structural similarity includes overall length of each polynucleotide fragment, as well as the sequence similarity of the polynucleotides. Sequence similarity can be described by the percent sequence identity over the whole length of the sequences, and/or by conserved regions comprising localized similarities such as contiguous nucleotides having 100% sequence identity, and percent sequence identity over a portion of the length of the sequences.

[0151] The amount of homology or sequence identity shared by a target and a donor polynucleotide can vary and includes total lengths and/or regions having unit integral values in the ranges of about 1-20 bp, 20-50 bp, 50-100 bp, 75-150 bp, 100-250 bp, 150-300 bp, 200-400 bp, 250-500 bp, 300-600 bp, 350-750 bp, 400-800 bp, 450-900 bp, 500-1000 bp, 600-1250 bp, 700-1500 bp, 800-1750 bp, 900-2000 bp, 1-2.5 kb, 1.5-3 kb, 2-4 kb, 2.5-5 kb, 3-6 kb, 3.5-7 kb, 4-8 kb, 5-10 kb, or up to and including the total length of the target site. These ranges include every integer within the range, for example, the range of 1-20 bp includes 1, 2, 3, 4, 5, 6, 7, 8, 9, 10, 11, 12, 13, 14, 15, 16, 17, 18, 19 and 20 bps. The amount of homology can also described by percent sequence identity over the full aligned length of the two polynucleotides which includes percent sequence identity of about at least 50%, 55%, 60%, 65%, 70%, 71%, 72%, 73%, 74%, 75%, 76%, 77%, 78%, 79%, 80%, 81%, 82%, 83%, 84%, 85%, 86%, 87%, 88%, 89%, 90%, 91%, 92%, 93%, 94%, 95%, 96%, 97%, 98%, 99% or 100%. Sufficient homology includes any combination of polynucleotide length, global percent sequence identity, and optionally conserved regions of contiguous nucleotides or local percent sequence identity, for example sufficient homology can be described as a region of 75-150 bp having at least 80% sequence identity to a region of the target locus. Sufficient homology can also be described by the predicted ability of two polynucleotides to specifically hybridize under high stringency conditions, see, for example, Sambrook et al., (1989) Molecular Cloning: A Laboratory Manual, (Cold Spring Harbor Laboratory Press, NY); Current Protocols in Molecular Biology, Ausubel et al., Eds (1994) Current Protocols, (Greene Publishing Associates, Inc. and John Wiley & Sons, Inc.); and, Tijssen (1993) Laboratory Techniques in Biochemistry and Molecular Biology—Hybridization with Nucleic Acid Probes, (Elsevier, New York).

[0152] In one embodiment of the disclosure, the method comprises a method for modifying a target site in the genome of a cell, the method comprising introducing into said cell at least one guide RNA, at least one donor DNA, and at least one Cas9 endonuclease selected from the group consisting of SEQ ID NOs: 47-69, a functional fragment of SEQ ID NOs: 47-69, and a functional variant of SEQ ID NOs: 47-69, wherein said at least one guide RNA and at least one Cas9 endonuclease can form a complex that is capable of recognizing, binding to, and optionally nicking or cleaving all or part of said target site, wherein said donor DNA comprises a polynucleotide of interest.

[0153] The guide polynucleotide/Cas9 endonuclease systems described herein can be used for introducing one or more polynucleotides of interest or one or more traits of interest into one or more target sites by introducing one or more guide polynucleotides, one Cas endonuclease, and optionally one or more donor DNAs into a plant cell (as described in U.S. patent application Ser. No. 14/463,687, file Aug. 20, 2014, incorporated by reference herein). A fertile plant can be produced from that plant cell that comprises an alteration at said one or more target sites, wherein the alteration is selected from the group consisting of (i) replacement of at least one nucleotide, (ii) a deletion of at least one nucleotide, (iii) an insertion of at least one nucleotide, and (iv) any combination of (i)-(iii). Plants comprising these altered target sites can be crossed with plants comprising at least one gene or trait of interest in the same complex trait locus; thereby further stacking traits in said complex trait locus (see also US-2013-0263324-A1, published 3 Oct. 2013 and in PCT/US13/22891, published Jan. 24, 2013).

[0154] As used herein, a “genomic region” is a segment of a chromosome in the genome of a cell that is present on either side of the target site or, alternatively, also comprises a portion of the target site. The genomic region can comprise at least 5-10, 5-15, 5-20, 5-25, 5-30, 5-35, 5-40, 5-45, 5-50, 5-55, 5-60, 5-65, 5-70, 5-75, 5-80, 5-85, 5-90, 5-95, 5-100, 5-200, 5-300, 5-400, 5-500, 5-600, 5-700, 5-800, 5-900, 5-1000, 5-1100, 5-1200, 5-1300, 5-1400, 5-1500, 5-1600, 5-1700, 5-1800, 5-1900, 5-2000, 5-2100, 5-2200, 5-2300, 5-2400, 5-2500, 5-2600, 5-2700, 5-2800. 5-2900, 5-3000, 5-3100 or more bases such that the genomic region has sufficient homology to undergo homologous recombination with the corresponding region of homology.

[0155] Polynucleotides of interest and/or traits can be stacked together in a complex trait locus as described in US 2013/0263324-A1, published Oct. 3, 2013 and in PCT/US13/22891, published Jan. 24, 2013, both applications are hereby incorporated by reference. The guide polynucleotide/Cas9 endonuclease system described herein provides for an efficient system to generate double strand breaks and allows for traits to be stacked in a complex trait locus.

[0156] The structural similarity between a given genomic region and the corresponding region of homology found on the donor DNA can be any degree of sequence identity that allows for homologous recombination to occur. For example, the amount of homology or sequence identity shared by the “region of homology” of the donor DNA and the “genomic region” of the organism genome can be at least 50%, 55%, 60%, 65%, 70%, 75%, 80%, 81%, 82%, 83%, 84%, 85%, 86%, 87%, 88%, 89%, 90%, 91%, 92%, 93%, 94%, 95%, 96%, 97%, 98%, 99% or 100% sequence identity, such that the sequences undergo homologous recombination

[0157] The region of homology on the donor DNA can have homology to any sequence flanking the target site. While in some embodiments the regions of homology share significant sequence homology to the genomic sequence immediately flanking the target site, it is recognized that the regions of homology can be designed to have sufficient homology to regions that may be further 5′ or 3′ to the target site. In still other embodiments, the regions of homology can also have homology with a fragment of the target site along with downstream genomic regions. In one embodiment, the first region of homology further comprises a first fragment of the target site and the second region of homology comprises a second fragment of the target site, wherein the first and second fragments are dissimilar.

[0158] As used herein, “homologous recombination” includes the exchange of DNA fragments between two DNA molecules at the sites of homology. The frequency of homologous recombination is influenced by a number of factors. Different organisms vary with respect to the amount of homologous recombination and the relative proportion of homologous to non-homologous recombination. Generally, the length of the region of homology affects the frequency of homologous recombination events: the longer the region of homology, the greater the frequency. The length of the homology region needed to observe homologous recombination is also species-variable. In many cases, at least 5 kb of homology has been utilized, but homologous recombination has been observed with as little as 25-50 bp of homology. See, for example, Singer et al., (1982) Cell 31:25-33; Shen and Huang, (1986) Genetics 112:441-57; Watt et al., (1985) Proc. Natl. Acad. Sci. USA 82:4768-72, Sugawara and Haber, (1992) Mol Cell Biol 12:563-75, Rubnitz and Subramani, (1984) Mol Cell Biol 4:2253-8; Ayares et al., (1986) Proc. Natl. Acad. Sci. USA 83:5199-203; Liskay et al., (1987) Genetics 115:161-7.

[0159] Homology-directed repair (HDR) is a mechanism in cells to repair double-stranded and single stranded DNA breaks. Homology-directed repair includes homologous recombination (HR) and single-strand annealing (SSA) (Lieber. 2010 Annu. Rev. Biochem. 79:181-211). The most common form of HDR is called homologous recombination (HR), which has the longest sequence homology requirements, between the donor and acceptor DNA. Other forms of HDR include single-stranded annealing (SSA) and breakage-induced replication, and these require shorter sequence homology relative to HR. Homology-directed repair at nicks (single-stranded breaks) can occur via a mechanism distinct from HDR at double-strand breaks (Davis and MaizeIs (2014) PNAS (0027-8424), 111 (10), p. E924-E932).

[0160] Alteration of the genome of a plant cell, for example, through homologous recombination (HR), is a powerful tool for genetic engineering. Homologous recombination has been demonstrated in plants (Halfter et al., (1992) Mol Gen Genet 231:186-93) and insects (Dray and Gloor, 1997, Genetics 147:689-99). Homologous recombination has also been accomplished in other organisms. For example, at least 150-200 bp of homology was required for homologous recombination in the parasitic protozoan Leishmania (Papadopoulou and Dumas, (1997) Nucleic Acids Res 25:4278-86). In the filamentous fungus Aspergillus nidulans, gene replacement has been accomplished with as little as 50 bp flanking homology (Chaveroche et al., (2000) Nucleic Acids Res 28:e97). Targeted gene replacement has also been demonstrated in the ciliate Tetrahymena thermophila (Gaertig et al., (1994) Nucleic Acids Res 22:5391-8). In mammals, homologous recombination has been most successful in the mouse using pluripotent embryonic stem cell lines (ES) that can be grown in culture, transformed, selected and introduced into a mouse embryo (Watson et al., 1992, Recombinant DNA, 2nd Ed., (Scientific American Books distributed by WH Freeman & Co.).

[0161] Error-prone DNA repair mechanisms can produce mutations at double-strand break sites. The Non-Homologous-End-Joining (NHEJ) pathways are the most common repair mechanism to bring the broken ends together (Bleuyard et al., (2006) DNA Repair 5:1-12). The structural integrity of chromosomes is typically preserved by the repair, but deletions, insertions, or other rearrangements are possible. The two ends of one double-strand break are the most prevalent substrates of NHEJ (Kirik et al., (2000) EMBO J 19:5562-6), however if two different double-strand breaks occur, the free ends from different breaks can be ligated and result in chromosomal deletions (Siebert and Puchta, (2002) Plant Cell 14:1121-31), or chromosomal translocations between different chromosomes (Pacher et al., (2007) Genetics 175:21-9).

[0162] Episomal DNA molecules can also be ligated into the double-strand break, for example, integration of T-DNAs into chromosomal double-strand breaks (Chilton and Que, (2003) Plant Physiol 133:956-65; Salomon and Puchta, (1998) EMBO J 17:6086-95). Once the sequence around the double-strand breaks is altered, for example, by exonuclease activities involved in the maturation of double-strand breaks, gene conversion pathways can restore the original structure if a homologous sequence is available, such as a homologous chromosome in non-dividing somatic cells, or a sister chromatid after DNA replication (Molinier et al., (2004) Plant Cell 16:342-52). Ectopic and/or epigenic DNA sequences may also serve as a DNA repair template for homologous recombination (Puchta, (1999) Genetics 152:1173-81).

[0163] Once a double-strand break is induced in the DNA, the cell's DNA repair mechanism is activated to repair the break. Error-prone DNA repair mechanisms can produce mutations at double-strand break sites. The most common repair mechanism to bring the broken ends together is the nonhomologous end-joining (NHEJ) pathway (Bleuyard et al., (2006) DNA Repair 5:1-12). The structural integrity of chromosomes is typically preserved by the repair, but deletions, insertions, or other rearrangements are possible (Siebert and Puchta, (2002) Plant Cell 14:1121-31; Pacher et al., (2007) Genetics 175:21-9).

[0164] Alternatively, the double-strand break can be repaired by homologous recombination between homologous DNA sequences. Once the sequence around the double-strand break is altered, for example, by exonuclease activities involved in the maturation of double-strand breaks, gene conversion pathways can restore the original structure if a homologous sequence is available, such as a homologous chromosome in non-dividing somatic cells, or a sister chromatid after DNA replication (Molinier et al., (2004) Plant Cell 16:342-52). Ectopic and/or epigenic DNA sequences may also serve as a DNA repair template for homologous recombination (Puchta, (1999) Genetics 152:1173-81).

[0165] The donor DNA may be introduced by any means known in the art. The donor DNA may be provided by any transformation method known in the art including, for example, Agrobacterium-mediated transformation or biolistic particle bombardment. The donor DNA may be present transiently in the cell or it could be introduced via a viral replicon. In the presence of the Cas9 endonuclease and the target site, the donor DNA is inserted into the transformed plant's genome. (see guide language)

[0166] Further uses for guide RNA/Cas9 endonuclease systems have been described (See U.S. Patent Application US 2015-0082478 A1, published on Mar. 19, 2015, WO2015/026886 A1, published on Feb. 26, 2015, US 2015-0059010 A1, published on Feb. 26, 2015, U.S. application 62/023,246, filed on Jul. 7, 2014, and U.S. application 62/036,652, filed on Aug. 13, 2014, all of which are incorporated by reference herein) and include but are not limited to modifying or replacing nucleotide sequences of interest (such as a regulatory elements), insertion of polynucleotides of interest, gene knock-out, gene-knock in, modification of splicing sites and/or introducing alternate splicing sites, modifications of nucleotide sequences encoding a protein of interest, amino acid and/or protein fusions, and gene silencing by expressing an inverted repeat into a gene of interest.

[0167] Given the diversity of Type II CRISPR-Cas systems (Fonfara et al. (2014) Nucleic Acids Res. 42:2577-2590), it is plausible that many of the Cas9 endonucleases and cognate guide RNAs may have unique sequence recognition and enzymatic properties different from those previously described or characterized. For example, cleavage activity and specificity may be enhanced or proto-spacer adjacent motif (PAM) sequence may be different leading to increased genomic target site density. To tap into this vast unexplored diversity and expand the repertoire of Cas9 endonucleases and cognate guide RNAs available for genome targeting, the two components of Cas9 target site recognition, the PAM sequence and the guide RNA (either duplexed CRISPR RNA (crRNA) and trans-activating CRISPR RNA (tracrRNA) or chimeric fusion of crRNA and tracrRNA (single guide RNA (sgRNA), need to be established for each new system.

[0168] As described herein, CRISPR-Cas loci (including Cas9 genes and open reading frames, CRISPR array and anti-repeats) from uncharacterized CRISPR-Cas systems (FIGS. 1-23) were identified by searching internal Pioneer-DuPont databases consisting of microbial genomes. The Cas9 endonuclease described herein can be expressed and purified by methods known in the art (such as those described in Example 2 of U.S. patent application 62/162,377 filed May 15, 2015, incorporated herein by reference). As described herein (Example 1), the transcriptional direction of the tracrRNA for all the CRISPR-Cas systems can be deduced and examples of sgRNAs (SEQ ID NOs:) and its components (VT, crRNA repeat, loop, anti-repeat and 3′tracrRNA) were identified for each new diverse CRISPR-Cas endonuclease described herein.

[0169] Polynucleotides of interest are further described herein and include polynucleotides reflective of the commercial markets and interests of those involved in the development of the crop. Crops and markets of interest change, and as developing nations open up world markets, new crops and technologies will emerge also. In addition, as our understanding of agronomic traits and characteristics such as yield and heterosis increase, the choice of genes for genetic engineering will change accordingly.

[0170] Further provided are methods for identifying at least one plant cell, comprising in its genome, a polynucleotide of interest integrated at the target site. A variety of methods are available for identifying those plant cells with insertion into the genome at or near to the target site without using a screenable marker phenotype. Such methods can be viewed as directly analyzing a target sequence to detect any change in the target sequence, including but not limited to PCR methods, sequencing methods, nuclease digestion, Southern blots, and any combination thereof. See, for example, U.S. patent application Ser. No. 12/147,834, herein incorporated by reference to the extent necessary for the methods described herein. The method also comprises recovering a plant from the plant cell comprising a polynucleotide of Interest integrated into its genome. The plant may be sterile or fertile. It is recognized that any polynucleotide of interest can be provided, integrated into the plant genome at the target site, and expressed in a plant.

[0171] Polynucleotides/polypeptides of interest include, but are not limited to, herbicide-resistance coding sequences, insecticidal coding sequences, nematicidal coding sequences, antimicrobial coding sequences, antifungal coding sequences, antiviral coding sequences, abiotic and biotic stress tolerance coding sequences, or sequences modifying plant traits such as yield, grain quality, nutrient content, starch quality and quantity, nitrogen fixation and/or utilization, fatty acids, and oil content and/or composition. More specific polynucleotides of interest include, but are not limited to, genes that improve crop yield, polypeptides that improve desirability of crops, genes encoding proteins conferring resistance to abiotic stress, such as drought, nitrogen, temperature, salinity, toxic metals or trace elements, or those conferring resistance to toxins such as pesticides and herbicides, or to biotic stress, such as attacks by fungi, viruses, bacteria, insects, and nematodes, and development of diseases associated with these organisms. General categories of genes of interest include, for example, those genes involved in information, such as zinc fingers, those involved in communication, such as kinases, and those involved in housekeeping, such as heat shock proteins. More specific categories of transgenes, for example, include genes encoding important traits for agronomics, insect resistance, disease resistance, herbicide resistance, fertility or sterility, grain characteristics, and commercial products. Genes of interest include, generally, those involved in oil, starch, carbohydrate, or nutrient metabolism as well as those affecting kernel size, sucrose loading, and the like that can be stacked or used in combination with other traits, such as but not limited to herbicide resistance, described herein.

[0172] Agronomically important traits such as oil, starch, and protein content can be genetically altered in addition to using traditional breeding methods. Modifications include increasing content of oleic acid, saturated and unsaturated oils, increasing levels of lysine and sulfur, providing essential amino acids, and also modification of starch. Hordothionin protein modifications are described in U.S. Pat. Nos. 5,703,049, 5,885,801, 5,885,802, and 5,990,389, herein incorporated by reference.

[0173] Polynucleotide sequences of interest may encode proteins involved in providing disease or pest resistance. By “disease resistance” or “pest resistance” is intended that the plants avoid the harmful symptoms that are the outcome of the plant-pathogen interactions. Pest resistance genes may encode resistance to pests that have great yield drag such as rootworm, cutworm, European Corn Borer, and the like. Disease resistance and insect resistance genes such as lysozymes or cecropins for antibacterial protection, or proteins such as defensins, glucanases or chitinases for antifungal protection, or Bacillus thuringiensis endotoxins, protease inhibitors, collagenases, lectins, or glycosidases for controlling nematodes or insects are all examples of useful gene products. Genes encoding disease resistance traits include detoxification genes, such as against fumonisin (U.S. Pat. No. 5,792,931); avirulence (avr) and disease resistance (R) genes (Jones et al. (1994) Science 266:789; Martin et al. (1993) Science 262:1432; and Mindrinos et al. (1994) Cell 78:1089); and the like. Insect resistance genes may encode resistance to pests that have great yield drag such as rootworm, cutworm, European Corn Borer, and the like. Such genes include, for example, Bacillus thuringiensis toxic protein genes (U.S. Pat. Nos. 5,366,892; 5,747,450; 5,736,514; 5,723,756; 5,593,881; and Geiser et al. (1986) Gene 48:109); and the like.

[0174] An “herbicide resistance protein” or a protein resulting from expression of an “herbicide resistance-encoding nucleic acid molecule” includes proteins that confer upon a cell the ability to tolerate a higher concentration of an herbicide than cells that do not express the protein, or to tolerate a certain concentration of an herbicide for a longer period of time than cells that do not express the protein. Herbicide resistance traits may be introduced into plants by genes coding for resistance to herbicides that act to inhibit the action of acetolactate synthase (ALS), in particular the sulfonylurea-type herbicides, genes coding for resistance to herbicides that act to inhibit the action of glutamine synthase, such as phosphinothricin or basta (e.g., the bar gene), glyphosate (e.g., the EPSP synthase gene and the GAT gene), HPPD inhibitors (e.g, the HPPD gene) or other such genes known in the art. See, for example, U.S. Pat. Nos. 7,626,077, 5,310,667, 5,866,775, 6,225,114, 6,248,876, 7,169,970, 6,867,293, and U.S. Provisional Application No. 61/401,456, each of which is herein incorporated by reference. The bar gene encodes resistance to the herbicide basta, the nptII gene encodes resistance to the antibiotics kanamycin and geneticin, and the ALS-gene mutants encode resistance to the herbicide chlorsulfuron.

[0175] Furthermore, it is recognized that the polynucleotide of interest may also comprise antisense sequences complementary to at least a portion of the messenger RNA (mRNA) for a targeted gene sequence of interest. Antisense nucleotides are constructed to hybridize with the corresponding mRNA. Modifications of the antisense sequences may be made as long as the sequences hybridize to and interfere with expression of the corresponding mRNA. In this manner, antisense constructions having 70%, 80%, or 85% sequence identity to the corresponding antisense sequences may be used. Furthermore, portions of the antisense nucleotides may be used to disrupt the expression of the target gene. Generally, sequences of at least 50 nucleotides, 100 nucleotides, 200 nucleotides, or greater may be used.

[0176] In addition, the polynucleotide of interest may also be used in the sense orientation to suppress the expression of endogenous genes in plants. Methods for suppressing gene expression in plants using polynucleotides in the sense orientation are known in the art. The methods generally involve transforming plants with a DNA construct comprising a promoter that drives expression in a plant operably linked to at least a portion of a nucleotide sequence that corresponds to the transcript of the endogenous gene. Typically, such a nucleotide sequence has substantial sequence identity to the sequence of the transcript of the endogenous gene, generally greater than about 65% sequence identity, about 85% sequence identity, or greater than about 95% sequence identity. See, U.S. Pat. Nos. 5,283,184 and 5,034,323; herein incorporated by reference.

[0177] The polynucleotide of interest can also be a phenotypic marker. A phenotypic marker is screenable or a selectable marker that includes visual markers and selectable markers whether it is a positive or negative selectable marker. Any phenotypic marker can be used. Specifically, a selectable or screenable marker comprises a DNA segment that allows one to identify, or select for or against a molecule or a cell that contains it, often under particular conditions. These markers can encode an activity, such as, but not limited to, production of RNA, peptide, or protein, or can provide a binding site for RNA, peptides, proteins, inorganic and organic compounds or compositions and the like.

[0178] Examples of selectable markers include, but are not limited to, DNA segments that comprise restriction enzyme sites; DNA segments that encode products which provide resistance against otherwise toxic compounds including antibiotics, such as, spectinomycin, ampicillin, kanamycin, tetracycline, Basta, neomycin phosphotransferase II (NEO) and hygromycin phosphotransferase (HPT)); DNA segments that encode products which are otherwise lacking in the recipient cell (e.g., tRNA genes, auxotrophic markers); DNA segments that encode products which can be readily identified (e.g., phenotypic markers such β-galactosidase, GUS; fluorescent proteins such as green fluorescent protein (GFP), cyan (CFP), yellow (YFP), red (RFP), and cell surface proteins); the generation of new primer sites for PCR (e.g., the juxtaposition of two DNA sequence not previously juxtaposed), the inclusion of DNA sequences not acted upon or acted upon by a restriction endonuclease or other DNA modifying enzyme, chemical, etc.; and, the inclusion of a DNA sequences required for a specific modification (e.g., methylation) that allows its identification.

[0179] Additional selectable markers include genes that confer resistance to herbicidal compounds, such as glufosinate ammonium, bromoxynil, imidazolinones, and 2,4-dichlorophenoxyacetate (2,4-D). Commercial traits can also be encoded on a gene or genes that could increase for example, starch for ethanol production, or provide expression of proteins. Exogenous products include plant enzymes and products as well as those from other sources including prokaryotes and other eukaryotes. Such products include enzymes, cofactors, hormones, and the like. The level of proteins, particularly modified proteins having improved amino acid distribution to improve the nutrient value of the plant, can be increased. This is achieved by the expression of such proteins having enhanced amino acid content.

[0180] The transgenes, recombinant DNA molecules, DNA sequences of interest, and polynucleotides of interest can be comprise one or more DNA sequences for gene silencing. Methods for gene silencing involving the expression of DNA sequences in plant are known in the art include, but are not limited to, cosuppression, antisense suppression, double-stranded RNA (dsRNA) interference, hairpin RNA (hpRNA) interference, intron-containing hairpin RNA (ihpRNA) interference, transcriptional gene silencing, and micro RNA (miRNA) interference

[0181] As used herein, “nucleic acid” means a polynucleotide and includes a single or a double-stranded polymer of deoxyribonucleotide or ribonucleotide bases. Nucleic acids may also include fragments and modified nucleotides. Thus, the terms “polynucleotide”, “nucleic acid sequence”, “nucleotide sequence” and “nucleic acid fragment” are used interchangeably to denote a polymer of RNA and/or DNA that is single- or double-stranded, optionally containing synthetic, non-natural, or altered nucleotide bases. Nucleotides (usually found in their 5′-monophosphate form) are referred to by their single letter designation as follows: “A” for adenosine or deoxyadenosine (for RNA or DNA, respectively), “C” for cytosine or deoxycytosine, “G” for guanosine or deoxyguanosine, “U” for uridine, “T” for deoxythymidine, “R” for purines (A or G), “Y” for pyrimidines (C or T), “K” for G or T, “H” for A or C or T, “I” for inosine, and “N” for any nucleotide.

[0182] “Open reading frame” is abbreviated ORF.

[0183] The terms “subfragment that is functionally equivalent” and “functionally equivalent subfragment” are used interchangeably herein. These terms refer to a portion or subsequence of an isolated nucleic acid fragment in which the ability to alter gene expression or produce a certain phenotype is retained whether or not the fragment or subfragment encodes an active enzyme. For example, the fragment or subfragment can be used in the design of genes to produce the desired phenotype in a transformed plant. Genes can be designed for use in suppression by linking a nucleic acid fragment or subfragment thereof, whether or not it encodes an active enzyme, in the sense or antisense orientation relative to a plant promoter sequence.

[0184] The term “conserved domain” or “motif” means a set of amino acids conserved at specific positions along an aligned sequence of evolutionarily related proteins. While amino acids at other positions can vary between homologous proteins, amino acids that are highly conserved at specific positions indicate amino acids that are essential to the structure, the stability, or the activity of a protein. Because they are identified by their high degree of conservation in aligned sequences of a family of protein homologues, they can be used as identifiers, or “signatures”, to determine if a protein with a newly determined sequence belongs to a previously identified protein family.

[0185] Polynucleotide and polypeptide sequences, variants thereof, and the structural relationships of these sequences can be described by the terms “homology”, “homologous”, “substantially identical”, “substantially similar” and “corresponding substantially” which are used interchangeably herein. These refer to polypeptide or nucleic acid fragments wherein changes in one or more amino acids or nucleotide bases do not affect the function of the molecule, such as the ability to mediate gene expression or to produce a certain phenotype. These terms also refer to modification(s) of nucleic acid fragments that do not substantially alter the functional properties of the resulting nucleic acid fragment relative to the initial, unmodified fragment. These modifications include deletion, substitution, and/or insertion of one or more nucleotides in the nucleic acid fragment.

[0186] Substantially similar nucleic acid sequences encompassed may be defined by their ability to hybridize (under moderately stringent conditions, e.g., 0.5×SSC, 0.1% SDS, 60° C.) with the sequences exemplified herein, or to any portion of the nucleotide sequences disclosed herein and which are functionally equivalent to any of the nucleic acid sequences disclosed herein. Stringency conditions can be adjusted to screen for moderately similar fragments, such as homologous sequences from distantly related organisms, to highly similar fragments, such as genes that duplicate functional enzymes from closely related organisms. Post-hybridization washes determine stringency conditions.

[0187] The term “selectively hybridizes” includes reference to hybridization, under stringent hybridization conditions, of a nucleic acid sequence to a specified nucleic acid target sequence to a detectably greater degree (e.g., at least 2-fold over background) than its hybridization to non-target nucleic acid sequences and to the substantial exclusion of non-target nucleic acids. Selectively hybridizing sequences typically have about at least 80% sequence identity, or 90% sequence identity, up to and including 100% sequence identity (i.e., fully complementary) with each other.

[0188] The term “stringent conditions” or “stringent hybridization conditions” includes reference to conditions under which a probe will selectively hybridize to its target sequence in an in vitro hybridization assay. Stringent conditions are sequence-dependent and will be different in different circumstances. By controlling the stringency of the hybridization and/or washing conditions, target sequences can be identified which are 100% complementary to the probe (homologous probing). Alternatively, stringency conditions can be adjusted to allow some mismatching in sequences so that lower degrees of similarity are detected (heterologous probing). Generally, a probe is less than about 1000 nucleotides in length, optionally less than 500 nucleotides in length.

[0189] Typically, stringent conditions will be those in which the salt concentration is less than about 1.5 M Na ion, typically about 0.01 to 1.0 M Na ion concentration (or other salt(s)) at pH 7.0 to 8.3, and at least about 30° C. for short probes (e.g., 10 to 50 nucleotides) and at least about 60° C. for long probes (e.g., greater than 50 nucleotides). Stringent conditions may also be achieved with the addition of destabilizing agents such as formamide. Exemplary low stringency conditions include hybridization with a buffer solution of 30 to 35% formamide, 1 M NaCl, 1% SDS (sodium dodecyl sulphate) at 37° C., and a wash in 1× to 2×SSC (20×SSC=3.0 M NaCl/0.3 M trisodium citrate) at 50 to 55° C. Exemplary moderate stringency conditions include hybridization in 40 to 45% formamide, 1 M NaCl, 1% SDS at 37° C., and a wash in 0.5× to 1×SSC at 55 to 60° C. Exemplary high stringency conditions include hybridization in 50% formamide, 1 M NaCl, 1% SDS at 37° C., and a wash in 0.1×SSC at 60 to 65° C.

[0190] “Sequence identity” or “identity” in the context of nucleic acid or polypeptide sequences refers to the nucleic acid bases or amino acid residues in two sequences that are the same when aligned for maximum correspondence over a specified comparison window.

[0191] The term “percentage of sequence identity” refers to the value determined by comparing two optimally aligned sequences over a comparison window, wherein the portion of the polynucleotide or polypeptide sequence in the comparison window may comprise additions or deletions (i.e., gaps) as compared to the reference sequence (which does not comprise additions or deletions) for optimal alignment of the two sequences. The percentage is calculated by determining the number of positions at which the identical nucleic acid base or amino acid residue occurs in both sequences to yield the number of matched positions, dividing the number of matched positions by the total number of positions in the window of comparison and multiplying the results by 100 to yield the percentage of sequence identity. Useful examples of percent sequence identities include, but are not limited to, 50%, 55%, 60%, 65%, 70%, 75%, 80%, 85%, 90% or 95%, or any integer percentage from 50% to 100%. These identities can be determined using any of the programs described herein.

[0192] Sequence alignments and percent identity or similarity calculations may be determined using a variety of comparison methods designed to detect homologous sequences including, but not limited to, the MegAlign™ program of the LASERGENE bioinformatics computing suite (DNASTAR Inc., Madison, Wis.). Within the context of this application it will be understood that where sequence analysis software is used for analysis, that the results of the analysis will be based on the “default values” of the program referenced, unless otherwise specified. As used herein “default values” will mean any set of values or parameters that originally load with the software when first initialized.

[0193] The “Clustal V method of alignment” corresponds to the alignment method labeled Clustal V (described by Higgins and Sharp, (1989) CABIOS 5:151-153; Higgins et al., (1992) Comput Appl Biosci 8:189-191) and found in the MegAlign™ program of the LASERGENE bioinformatics computing suite (DNASTAR Inc., Madison, Wis.). For multiple alignments, the default values correspond to GAP PENALTY=10 and GAP LENGTH PENALTY=10. Default parameters for pairwise alignments and calculation of percent identity of protein sequences using the Clustal method are KTUPLE=1, GAP PENALTY=3, WINDOW=5 and DIAGONALS SAVED=5. For nucleic acids these parameters are KTUPLE=2, GAP PENALTY=5, WINDOW=4 and DIAGONALS SAVED=4. After alignment of the sequences using the Clustal V program, it is possible to obtain a “percent identity” by viewing the “sequence distances” table in the same program.

[0194] The “Clustal W method of alignment” corresponds to the alignment method labeled Clustal W (described by Higgins and Sharp, (1989) CABIOS 5:151-153; Higgins et al., (1992) Comput Appl Biosci 8:189-191) and found in the MegAlign™ v6.1 program of the LASERGENE bioinformatics computing suite (DNASTAR Inc., Madison, Wis.). Default parameters for multiple alignment (GAP PENALTY=10, GAP LENGTH PENALTY=0.2, Delay Divergen Seqs (%)=30, DNA Transition Weight=0.5, Protein Weight Matrix=Gonnet Series, DNA Weight Matrix=IUB). After alignment of the sequences using the Clustal W program, it is possible to obtain a “percent identity” by viewing the “sequence distances” table in the same program.

[0195] Unless otherwise stated, sequence identity/similarity values provided herein refer to the value obtained using GAP Version 10 (GCG, Accelrys, San Diego, Calif.) using the following parameters: % identity and % similarity for a nucleotide sequence using a gap creation penalty weight of 50 and a gap length extension penalty weight of 3, and the nwsgapdna.cmp scoring matrix; % identity and % similarity for an amino acid sequence using a GAP creation penalty weight of 8 and a gap length extension penalty of 2, and the BLOSUM62 scoring matrix (Henikoff and Henikoff, (1989) Proc. Natl. Acad. Sci. USA 89:10915). GAP uses the algorithm of Needleman and Wunsch, (1970) J Mol Biol 48:443-53, to find an alignment of two complete sequences that maximizes the number of matches and minimizes the number of gaps. GAP considers all possible alignments and gap positions and creates the alignment with the largest number of matched bases and the fewest gaps, using a gap creation penalty and a gap extension penalty in units of matched bases.

[0196] “BLAST” is a searching algorithm provided by the National Center for Biotechnology Information (NCBI) used to find regions of similarity between biological sequences. The program compares nucleotide or protein sequences to sequence databases and calculates the statistical significance of matches to identify sequences having sufficient similarity to a query sequence such that the similarity would not be predicted to have occurred randomly. BLAST reports the identified sequences and their local alignment to the query sequence.

[0197] It is well understood by one skilled in the art that many levels of sequence identity are useful in identifying polypeptides from other species or modified naturally or synthetically wherein such polypeptides have the same or similar function or activity. Useful examples of percent identities include, but are not limited to, 50%, 55%, 60%, 65%, 70%, 75%, 80%, 85%, 90% or 95%, or any integer percentage from 50% to 100%. Indeed, any integer amino acid identity from 50% to 100% may be useful in describing the present disclosure, such as 51%, 52%, 53%, 54%, 55%, 56%, 57%, 58%, 59%, 60%, 61%, 62%, 63%, 64%, 65%, 66%, 67%, 68%, 69%, 70%, 71%, 72%, 73%, 74%, 75%, 76%, 77%, 78%, 79%, 80%, 81%, 82%, 83%, 84%, 85%, 86%, 87%, 88%, 89%, 90%, 91%, 92%, 93%, 94%, 95%, 96%, 97%, 98% or 99%.

[0198] “Gene” includes a nucleic acid fragment that expresses a functional molecule such as, but not limited to, a specific protein, including regulatory sequences preceding (5′ non-coding sequences) and following (3′ non-coding sequences) the coding sequence. “Native gene” refers to a gene as found in nature with its own regulatory sequences.

[0199] A “mutated gene” is a gene that has been altered through human intervention. Such a “mutated gene” has a sequence that differs from the sequence of the corresponding non-mutated gene by at least one nucleotide addition, deletion, or substitution. In certain embodiments of the disclosure, the mutated gene comprises an alteration that results from a guide polynucleotide/Cas9 endonuclease system as disclosed herein. A mutated plant is a plant comprising a mutated gene.

[0200] As used herein, a “targeted mutation” is a mutation in a gene, such as a native gene, that was made by altering a target sequence within that gene using a method involving a double-strand-break-inducing agent that is capable of inducing a double-strand break in the DNA of the target sequence as disclosed herein or known in the art.

[0201] The guide RNA/Cas9 endonuclease induced targeted mutation can occur in a nucleotide sequence that is located within or outside a genomic target site that is recognized and cleaved by a Cas9 endonuclease.

[0202] The term “genome” as it applies to a plant cells encompasses not only chromosomal DNA found within the nucleus, but organelle DNA found within subcellular components (e.g., mitochondria, or plastid) of the cell.

[0203] A “codon-modified gene” or “codon-preferred gene” or “codon-optimized gene” is a gene having its frequency of codon usage designed to mimic the frequency of preferred codon usage of the host cell.

[0204] An “allele” is one of several alternative forms of a gene occupying a given locus on a chromosome. When all the alleles present at a given locus on a chromosome are the same, that plant is homozygous at that locus. If the alleles present at a given locus on a chromosome differ, that plant is heterozygous at that locus.

[0205] “Coding sequence” refers to a polynucleotide sequence which codes for a specific amino acid sequence. “Regulatory sequences” refer to nucleotide sequences located upstream (5′ non-coding sequences), within, or downstream (3′ non-coding sequences) of a coding sequence, and which influence the transcription, RNA processing or stability, or translation of the associated coding sequence. Regulatory sequences may include, but are not limited to: promoters, translation leader sequences, 5′ untranslated sequences, 3′ untranslated sequences, introns, polyadenylation target sequences, RNA processing sites, effector binding sites, and stem-loop structures.

[0206] Methods are available in the art for synthesizing plant-preferred genes. See, for example, U.S. Pat. Nos. 5,380,831, and 5,436,391, and Murray et al. (1989) Nucleic Acids Res. 17:477-498, herein incorporated by reference. Additional sequence modifications are known to enhance gene expression in a plant host. These include, for example, elimination of: one or more sequences encoding spurious polyadenylation signals, one or more exon-intron splice site signals, one or more transposon-like repeats, and other such well-characterized sequences that may be deleterious to gene expression. The G-C content of the sequence may be adjusted to levels average for a given plant host, as calculated by reference to known genes expressed in the host plant cell. When possible, the sequence is modified to avoid one or more predicted hairpin secondary mRNA structures. Thus, “a plant-optimized nucleotide sequence” of the present disclosure comprises one or more of such sequence modifications.

[0207] A promoter is a region of DNA involved in recognition and binding of RNA polymerase and other proteins to initiate transcription. The promoter sequence consists of proximal and more distal upstream elements, the latter elements often referred to as enhancers. An “enhancer” is a DNA sequence that can stimulate promoter activity, and may be an innate element of the promoter or a heterologous element inserted to enhance the level or tissue-specificity of a promoter. Promoters may be derived in their entirety from a native gene, or be composed of different elements derived from different promoters found in nature, and/or comprise synthetic DNA segments. It is understood by those skilled in the art that different promoters may direct the expression of a gene in different tissues or cell types, or at different stages of development, or in response to different environmental conditions. It is further recognized that since in most cases the exact boundaries of regulatory sequences have not been completely defined, DNA fragments of some variation may have identical promoter activity. Promoters that cause a gene to be expressed in most cell types at most times are commonly referred to as “constitutive promoters”.

[0208] It has been shown that certain promoters are able to direct RNA synthesis at a higher rate than others. These are called “strong promoters”. Certain other promoters have been shown to direct RNA synthesis at higher levels only in particular types of cells or tissues and are often referred to as “tissue specific promoters”, or “tissue-preferred promoters” if the promoters direct RNA synthesis preferably in certain tissues but also in other tissues at reduced levels. Since patterns of expression of a chimeric gene (or genes) introduced into a plant are controlled using promoters, there is an ongoing interest in the isolation of novel promoters which are capable of controlling the expression of a chimeric gene or (genes) at certain levels in specific tissue types or at specific plant developmental stages.

[0209] A “chimeric gene” refers to any gene that is not a native gene, comprising regulatory and coding sequences that are not found together in nature (i.e., the regulatory and coding regions are heterologous with each other). Accordingly, a chimeric gene may comprise regulatory sequences and coding sequences that are derived from different sources, or regulatory sequences and coding sequences derived from the same source, but arranged in a manner different than that found in nature. A “foreign” or “heterologous” gene refers to a gene that is introduced into the host organism by gene transfer. Foreign genes can comprise native genes inserted into a non-native organism, native genes introduced into a new location within the native host, or chimeric genes. The polynucleotide sequences in certain embodiments disclosed herein are heterologous. A “transgene” is a gene that has been introduced into the genome by a transformation procedure. A “codon-optimized” open reading frame has its frequency of codon usage designed to mimic the frequency of preferred codon usage of the host cell. A plant promoter can include a promoter capable of initiating transcription in a plant cell, for a review of plant promoters, see, Potenza et al., (2004) In Vitro Cell Dev Biol 40:1-22. Constitutive promoters include, for example, the core promoter of the Rsyn7 promoter and other constitutive promoters disclosed in WO99/43838 and U.S. Pat. No. 6,072,050; the core CaMV 35S promoter (Odell et al., (1985) Nature 313:810-2); rice actin (McElroy et al., (1990) Plant Cell 2:163-71); ubiquitin (Christensen et al., (1989) Plant Mol Biol 12:619-32; Christensen et al., (1992) Plant Mol Biol 18:675-89); pEMU (Last et al., (1991) Theor Appl Genet 81:581-8); MAS (Velten et al., (1984) EMBO J3:2723-30); ALS promoter (U.S. Pat. No. 5,659,026), and the like. Other constitutive promoters are described in, for example, U.S. Pat. Nos. 5,608,149; 5,608,144; 5,604,121; 5,569,597; 5,466,785; 5,399,680; 5,268,463; 5,608,142 and 6,177,611. In some examples an inducible promoter may be used. Pathogen-inducible promoters induced following infection by a pathogen include, but are not limited to those regulating expression of PR proteins, SAR proteins, beta-1,3-glucanase, chitinase, etc.

[0210] Chemical-regulated promoters can be used to modulate the expression of a gene in a plant through the application of an exogenous chemical regulator. The promoter may be a chemical-inducible promoter, where application of the chemical induces gene expression, or a chemical-repressible promoter, where application of the chemical represses gene expression. Chemical-inducible promoters include, but are not limited to, the maize 1n2-2 promoter, activated by benzene sulfonamide herbicide safeners (De Veylder et al., (1997) Plant Cell Physiol 38:568-77), the maize GST promoter (GST-II-27, WO93/01294), activated by hydrophobic electrophilic compounds used as pre-emergent herbicides, and the tobacco PR-1a promoter (Ono et al., (2004) Biosci Biotechnol Biochem 68:803-7) activated by salicylic acid. Other chemical-regulated promoters include steroid-responsive promoters (see, for example, the glucocorticoid-inducible promoter (Schena et al., (1991) Proc. Natl. Acad. Sci. USA 88:10421-5; McNellis et al., (1998) Plant J 14:247-257); tetracycline-inducible and tetracycline-repressible promoters (Gatz et al., (1991) Mol Gen Genet 227:229-37; U.S. Pat. Nos. 5,814,618 and 5,789,156).

[0211] Tissue-preferred promoters can be utilized to target enhanced expression within a particular plant tissue. Tissue-preferred promoters include, for example, Kawamata et al., (1997) Plant Cell Physiol 38:792-803; Hansen et al., (1997) Mol Gen Genet 254:337-43; Russell et al., (1997) Transgenic Res 6:157-68; Rinehart et al., (1996) Plant Physiol 112:1331-41; Van Camp et al., (1996) Plant Physiol 112:525-35; Canevascini et al., (1996) Plant Physiol 112:513-524; Lam, (1994) Results Probl Cell Differ 20:181-96; and Guevara-Garcia et al., (1993) Plant J 4:495-505. Leaf-preferred promoters include, for example, Yamamoto et al., (1997) Plant J 12:255-65; Kwon et al., (1994) Plant Physiol 105:357-67; Yamamoto et al., (1994) Plant Cell Physiol 35:773-8; Gotor et al., (1993) Plant J 3:509-18; Orozco et al., (1993) Plant Mol Biol 23:1129-38; Matsuoka et al., (1993) Proc. Natl. Acad. Sci. USA 90:9586-90; Simpson et al., (1958) EMBO J 4:2723-9; Timko et al., (1988) Nature 318:57-8. Root-preferred promoters include, for example, Hire et al., (1992) Plant Mol Biol 20:207-18 (soybean root-specific glutamine synthase gene); Miao et al., (1991) Plant Cell 3:11-22 (cytosolic glutamine synthase (GS)); Keller and Baumgartner, (1991) Plant Cell 3:1051-61 (root-specific control element in the GRP 1.8 gene of French bean); Sanger et al., (1990) Plant Mol Biol 14:433-43 (root-specific promoter of A. tumefaciens mannopine synthase (MAS)); Bogusz et al., (1990) Plant Cell 2:633-41 (root-specific promoters isolated from Parasponia andersonii and Trema tomentosa); Leach and Aoyagi, (1991) Plant Sci 79:69-76 (A. rhizogenes roIC and roID root-inducing genes); Teeri et al., (1989) EMBO J 8:343-50 (Agrobacterium wound-induced TR1′ and TR2′ genes); VfENOD-GRP3 gene promoter (Kuster et al., (1995) Plant Mol Biol 29:759-72); and roIB promoter (Capana et al., (1994) Plant Mol Biol 25:681-91; phaseolin gene (Murai et al., (1983) Science 23:476-82; Sengopta-Gopalen et al., (1988) Proc. Natl. Acad. Sci. USA 82:3320-4). See also, U.S. Pat. Nos. 5,837,876; 5,750,386; 5,633,363; 5,459,252; 5,401,836; 5,110,732 and 5,023,179.

[0212] Seed-preferred promoters include both seed-specific promoters active during seed development, as well as seed-germinating promoters active during seed germination. See, Thompson et al., (1989) BioEssays 10:108. Seed-preferred promoters include, but are not limited to, Cim1 (cytokinin-induced message); cZ19B1 (maize 19 kDa zein); and milps (myo-inositol-1-phosphate synthase); (WO00/11177; and U.S. Pat. No. 6,225,529). For dicots, seed-preferred promoters include, but are not limited to, bean β-phaseolin, napin, β-conglycinin, soybean lectin, cruciferin, and the like. For monocots, seed-preferred promoters include, but are not limited to, maize 15 kDa zein, 22 kDa zein, 27 kDa gamma zein, waxy, shrunken 1, shrunken 2, globulin 1, oleosin, and nuc1. See also, WO00/12733, where seed-preferred promoters from END1 and END2 genes are disclosed.

[0213] The term “inducible promoter” refers to promoters that selectively express a coding sequence or functional RNA in response to the presence of an endogenous or exogenous stimulus, for example by chemical compounds (chemical inducers) or in response to environmental, hormonal, chemical, and/or developmental signals. Inducible or regulated promoters include, for example, promoters induced or regulated by light, heat, stress, flooding or drought, salt stress, osmotic stress, phytohormones, wounding, or chemicals such as ethanol, abscisic acid (ABA), jasmonate, salicylic acid, or safeners.

[0214] An example of a stress-inducible is RD29A promoter (Kasuga et al. (1999) Nature Biotechnol. 17:287-91). One of ordinary skill in the art is familiar with protocols for simulating drought conditions and for evaluating drought tolerance of plants that have been subjected to simulated or naturally-occurring drought conditions. For example, one can simulate drought conditions by giving plants less water than normally required or no water over a period of time, and one can evaluate drought tolerance by looking for differences in physiological and/or physical condition, including (but not limited to) vigor, growth, size, or root length, or in particular, leaf color or leaf area size. Other techniques for evaluating drought tolerance include measuring chlorophyll fluorescence, photosynthetic rates and gas exchange rates. Also, one of ordinary skill in the art is familiar with protocols for simulating stress conditions such as osmotic stress, salt stress and temperature stress and for evaluating stress tolerance of plants that have been subjected to simulated or naturally-occurring stress conditions.

[0215] Another example of an inducible promoter useful in plant cells has been described in US patent application, US 2013-0312137A1, published on Nov. 21, 2013, incorporated by reference herein. US patent application US 2013-0312137A1 describes a ZmCAS1 promoter from a CBSU-Anther_Subtraction library (CAS1) gene encoding a mannitol dehydrogenase from maize, and functional fragments thereof. The ZmCAS1 promoter (also referred to as “CAS1 promoter”, “mannitol dehydrogenase promoter”, “mdh promoter”) can be induced by a chemical or stress treatment. The chemical can be a safener such as, but not limited to, N-(aminocarbonyl)-2-chlorobenzenesulfonamide (2-CBSU). The stress treatment can be a heat treatment such as, but not limited to, a heat shock treatment (see also U.S. provisional patent application,62/120,421, filed on Feb. 25, 2015, and incorporated by reference herein.

[0216] New promoters of various types useful in plant cells are constantly being discovered; numerous examples may be found in the compilation by Okamuro and Goldberg, (1989) In The Biochemistry of Plants, Vol. 115, Stumpf and Conn, eds (New York, N.Y.: Academic Press), pp. 1-82.

[0217] “Translation leader sequence” refers to a polynucleotide sequence located between the promoter sequence of a gene and the coding sequence. The translation leader sequence is present in the mRNA upstream of the translation start sequence. The translation leader sequence may affect processing of the primary transcript to mRNA, mRNA stability or translation efficiency. Examples of translation leader sequences have been described (e.g., Turner and Foster, (1995) Mol Biotechnol 3:225-236).

[0218] “3′ non-coding sequences”, “transcription terminator” or “termination sequences” refer to DNA sequences located downstream of a coding sequence and include polyadenylation recognition sequences and other sequences encoding regulatory signals capable of affecting mRNA processing or gene expression. The polyadenylation signal is usually characterized by affecting the addition of polyadenylic acid tracts to the 3′ end of the mRNA precursor. The use of different 3′ non-coding sequences is exemplified by Ingelbrecht et aL, (1989) Plant Cell 1:671-680.

[0219] “RNA transcript” refers to the product resulting from RNA polymerase-catalyzed transcription of a DNA sequence. When the RNA transcript is a perfect complimentary copy of the DNA sequence, it is referred to as the primary transcript or pre-mRNA. A RNA transcript is referred to as the mature RNA or mRNA when it is a RNA sequence derived from post-transcriptional processing of the primary transcript pre mRNA. “Messenger RNA” or “mRNA” refers to the RNA that is without introns and that can be translated into protein by the cell. “cDNA” refers to a DNA that is complementary to, and synthesized from, an mRNA template using the enzyme reverse transcriptase. The cDNA can be single-stranded or converted into double-stranded form using the Klenow fragment of DNA polymerase I. “Sense” RNA refers to RNA transcript that includes the mRNA and can be translated into protein within a cell or in vitro. “Antisense RNA” refers to an RNA transcript that is complementary to all or part of a target primary transcript or mRNA, and that blocks the expression of a target gene (see, e.g., U.S. Pat. No. 5,107,065). The complementarity of an antisense RNA may be with any part of the specific gene transcript, i.e., at the 5′ non-coding sequence, 3′ non-coding sequence, introns, or the coding sequence. “Functional RNA” refers to antisense RNA, ribozyme RNA, or other RNA that may not be translated but yet has an effect on cellular processes. The terms “complement” and “reverse complement” are used interchangeably herein with respect to mRNA transcripts, and are meant to define the antisense RNA of the message.

[0220] The term “operably linked” refers to the association of nucleic acid sequences on a single nucleic acid fragment so that the function of one is regulated by the other. For example, a promoter is operably linked with a coding sequence when it is capable of regulating the expression of that coding sequence (i.e., the coding sequence is under the transcriptional control of the promoter). Coding sequences can be operably linked to regulatory sequences in a sense or antisense orientation. In another example, the complementary RNA regions can be operably linked, either directly or indirectly, 5′ to the target mRNA, or 3′ to the target mRNA, or within the target mRNA, or a first complementary region is 5′ and its complement is 3′ to the target mRNA.

[0221] Standard recombinant DNA and molecular cloning techniques used herein are well known in the art and are described more fully in Sambrook et al., Molecular Cloning: A Laboratory Manual; Cold Spring Harbor Laboratory: Cold Spring Harbor, N.Y. (1989). Transformation methods are well known to those skilled in the art and are described infra.

[0222] The term “recombinant” refers to an artificial combination of two otherwise separated segments of sequence, e.g., by chemical synthesis, or manipulation of isolated segments of nucleic acids by genetic engineering techniques.

[0223] The terms “plasmid”, “vector” and “cassette” refer to an extra chromosomal element often carrying genes that are not part of the central metabolism of the cell, and usually in the form of double-stranded DNA. Such elements may be autonomously replicating sequences, genome integrating sequences, phage, or nucleotide sequences, in linear or circular form, of a single- or double-stranded DNA or RNA, derived from any source, in which a number of nucleotide sequences have been joined or recombined into a unique construction which is capable of introducing a polynucleotide of interest into a cell. “Transformation cassette” refers to a specific vector containing a gene and having elements in addition to the gene that facilitates transformation of a particular host cell. “Expression cassette” refers to a specific vector containing a gene and having elements in addition to the gene that allow for expression of that gene in a host.

[0224] The terms “recombinant DNA molecule”, “recombinant construct”, “expression construct”, “ construct”, “construct”, and “recombinant DNA construct” are used interchangeably herein. A recombinant construct comprises an artificial combination of nucleic acid fragments, e.g., regulatory and coding sequences that are not all found together in nature. For example, a construct may comprise regulatory sequences and coding sequences that are derived from different sources, or regulatory sequences and coding sequences derived from the same source, but arranged in a manner different than that found in nature. Such a construct may be used by itself or may be used in conjunction with a vector. If a vector is used, then the choice of vector is dependent upon the method that will be used to transform host cells as is well known to those skilled in the art. For example, a plasmid vector can be used. The skilled artisan is well aware of the genetic elements that must be present on the vector in order to successfully transform, select and propagate host cells. The skilled artisan will also recognize that different independent transformation events may result in different levels and patterns of expression (Jones et al., (1985) EMBO J 4:2411-2418; De Almeida et aL, (1989) Mol Gen Genetics 218:78-86), and thus that multiple events are typically screened in order to obtain lines displaying the desired expression level and pattern. Such screening may be accomplished standard molecular biological, biochemical, and other assays including Southern analysis of DNA, Northern analysis of mRNA expression, PCR, real time quantitative PCR (qPCR), reverse transcription PCR (RT-PCR), immunoblotting analysis of protein expression, enzyme or activity assays, and/or phenotypic analysis.

[0225] The term “expression”, as used herein, refers to the production of a functional end-product (e.g., an mRNA, guide RNA, or a protein) in either precursor or mature form.

[0226] The term “introducing” includes providing a nucleic acid (e.g., expression construct) or protein into a cell. “Introducing” is intended to mean presenting to the organism, such as a cell or organism, the polynucleotide or polypeptide or polynucleotide-protein complex (also referred to as ribonucleotide protein complex or RNP), in such a manner that the component(s) gains access to the interior of a cell of the organism or to the cell itself. The methods and compositions do not depend on a particular method for introducing a sequence into an organism or cell, only that the polynucleotide or polypeptide gains access to the interior of at least one cell of the organism. Introducing includes reference to the incorporation of a nucleic acid into a eukaryotic or prokaryotic cell where the nucleic acid may be incorporated into the genome of the cell, and includes reference to the transient (direct) provision of a nucleic acid, protein or polynucleotide-protein complex (PGEN, RGEN) to the cell.

[0227] Introduced includes reference to stable or transient transformation methods, as well as sexually crossing. Thus, “introducing” in the context of inserting a nucleic acid fragment (e.g., a recombinant DNA construct/expression construct) into a cell, includes “transfection” or “transformation” or “transduction” and includes reference to the incorporation of a nucleic acid fragment into a eukaryotic or prokaryotic cell where the nucleic acid fragment may be incorporated into the genome of the cell (e.g., chromosome, plasmid, plastid, or mitochondrial DNA), converted into an autonomous replicon, or transiently expressed (e.g., transfected mRNA).

[0228] “Mature” protein refers to a post-translationally processed polypeptide (i.e., one from which any pre- or propeptides present in the primary translation product have been removed). “Precursor” protein refers to the primary product of translation of mRNA (i.e., with pre- and propeptides still present). Pre- and propeptides may be but are not limited to intracellular localization signals.

[0229] “Stable transformation” refers to the transfer of a nucleic acid fragment into a genome of a host organism, including both nuclear and organellar genomes, resulting in genetically stable inheritance. In contrast, “transient transformation” refers to the transfer of a nucleic acid fragment into the nucleus, or other DNA-containing organelle, of a host organism resulting in gene expression without integration or stable inheritance. Host organisms containing the transformed nucleic acid fragments are referred to as “transgenic” organisms.

[0230] The commercial development of genetically improved germplasm has also advanced to the stage of introducing multiple traits into crop plants, often referred to as a gene stacking approach. In this approach, multiple genes conferring different characteristics of interest can be introduced into a plant. Gene stacking can be accomplished by many means including but not limited to co-transformation, retransformation, and crossing lines with different genes of interest.

[0231] The term “plant” refers to whole plants, plant organs, plant tissues, seeds, plant cells, seeds and progeny of the same. Plant cells include, without limitation, cells from seeds, suspension cultures, embryos, meristematic regions, callus tissue, leaves, roots, shoots, gametophytes, sporophytes, pollen and microspores. Plant parts include differentiated and undifferentiated tissues including, but not limited to roots, stems, shoots, leaves, pollens, seeds, tumor tissue and various forms of cells and culture (e.g., single cells, protoplasts, embryos, and callus tissue). The plant tissue may be in plant or in a plant organ, tissue or cell culture. The term “plant organ” refers to plant tissue or a group of tissues that constitute a morphologically and functionally distinct part of a plant. The term “genome” refers to the entire complement of genetic material (genes and non-coding sequences) that is present in each cell of an organism, or virus or organelle; and/or a complete set of chromosomes inherited as a (haploid) unit from one parent. “Progeny” comprises any subsequent generation of a plant.

[0232] A transgenic plant includes, for example, a plant which comprises within its genome a heterologous polynucleotide introduced by a transformation step. The heterologous polynucleotide can be stably integrated within the genome such that the polynucleotide is passed on to successive generations. The heterologous polynucleotide may be integrated into the genome alone or as part of a recombinant DNA construct. A transgenic plant can also comprise more than one heterologous polynucleotide within its genome. Each heterologous polynucleotide may confer a different trait to the transgenic plant. A heterologous polynucleotide can include a sequence that originates from a foreign species, or, if from the same species, can be substantially modified from its native form. Transgenic can include any cell, cell line, callus, tissue, plant part or plant, the genotype of which has been altered by the presence of heterologous nucleic acid including those transgenics initially so altered as well as those created by sexual crosses or asexual propagation from the initial transgenic. The alterations of the genome (chromosomal or extra-chromosomal) by conventional plant breeding methods, by the genome editing procedure described herein that does not result in an insertion of a foreign polynucleotide, or by naturally occurring events such as random cross-fertilization, non-recombinant viral infection, non-recombinant bacterial transformation, non-recombinant transposition, or spontaneous mutation are not intended to be regarded as transgenic.

[0233] In certain embodiments of the disclosure, a fertile plant is a plant that produces viable male and female gametes and is self-fertile. Such a self-fertile plant can produce a progeny plant without the contribution from any other plant of a gamete and the genetic material contained therein. Other embodiments of the disclosure can involve the use of a plant that is not self-fertile because the plant does not produce male gametes, or female gametes, or both, that are viable or otherwise capable of fertilization. As used herein, a “male sterile plant” is a plant that does not produce male gametes that are viable or otherwise capable of fertilization. As used herein, a “female sterile plant” is a plant that does not produce female gametes that are viable or otherwise capable of fertilization. It is recognized that male-sterile and female-sterile plants can be female-fertile and male-fertile, respectively. It is further recognized that a male fertile (but female sterile) plant can produce viable progeny when crossed with a female fertile plant and that a female fertile (but male sterile) plant can produce viable progeny when crossed with a male fertile plant.

[0234] The guided Cas9 endonuclease systems of the present disclosure can be used in any prokaryotic or eukaryotic organism including non-conventional yeast and yeast or any fungal species that predominantly exist in unicellular form.

[0235] A “centimorgan” (cM) or “map unit” is the distance between two linked genes, markers, target sites, loci, or any pair thereof, wherein 1% of the products of meiosis are recombinant. Thus, a centimorgan is equivalent to a distance equal to a 1% average recombination frequency between the two linked genes, markers, target sites, loci, or any pair thereof.

[0236] The present disclosure finds use in the breeding of plants comprising one or more transgenic traits. Most commonly, transgenic traits are randomly inserted throughout the plant genome as a consequence of transformation systems based on Agrobacterium, biolistics, or other commonly used procedures. More recently, gene targeting protocols have been developed that enable directed transgene insertion. One important technology, site-specific integration (SSI) enables the targeting of a transgene to the same chromosomal location as a previously inserted transgene. Custom-designed meganucleases and custom-designed zinc finger meganucleases allow researchers to design nucleases to target specific chromosomal locations, and these reagents allow the targeting of transgenes at the chromosomal site cleaved by these nucleases.

[0237] The currently used systems for precision genetic engineering of eukaryotic genomes, e.g. plant genomes, rely upon homing endonucleases, meganucleases, zinc finger nucleases, and transcription activator—like effector nucleases (TALENs), which require de novo protein engineering for every new target locus. The highly specific, RNA-directed DNA nuclease, guide RNA/ Cas9 endonuclease system described herein, is more easily customizable and therefore more useful when modification of many different target sequences is the goal. This disclosure takes further advantage of the two component nature of the guide RNA/ Cas9 system, with its constant protein component, the Cas9 endonuclease, and its variable and easily reprogrammable targeting component, the guide RNA or the crRNA.

[0238] The guide RNA/Cas9 system described herein is especially useful for genome engineering, especially plant genome engineering, in circumstances where nuclease off-target cutting can be toxic to the targeted cells. In one embodiment of the guide RNA/Cas9 system described herein, the constant component, in the form of an expression-optimized Cas9 gene, is stably integrated into the target genome, e.g. plant genome. Expression of the Cas9 gene is under control of a promoter, e.g. plant promoter, which can be a constitutive promoter, tissue-specific promoter or inducible promoter, e.g. temperature-inducible, stress-inducible, developmental stage inducible, or chemically inducible promoter. In the absence of the variable component, i.e. the guide RNA or crRNA, the Cas9 protein is not able to cut DNA and therefore its presence in the plant cell should have little or no consequence. Hence a key advantage of the guide RNA/Cas9 system described herein is the ability to create and maintain a cell line or transgenic organism capable of efficient expression of the Cas9 protein with little or no consequence to cell viability. In order to induce cutting at desired genomic sites to achieve targeted genetic modifications, guide RNAs or crRNAs can be introduced by a variety of methods into cells containing the stably-integrated and expressed cas9 gene. For example, guide RNAs or crRNAs can be chemically or enzymatically synthesized, and introduced into the Cas9 expressing cells via direct delivery methods such a particle bombardment or electroporation.

[0239] Alternatively, genes capable of efficiently expressing guide RNAs or crRNAs in the target cells can be synthesized chemically, enzymatically or in a biological system, and these genes can be introduced into the Cas9 expressing cells via direct delivery methods such a particle bombardment, electroporation or biological delivery methods such as Agrobacterium mediated DNA delivery.

[0240] A guide RNA/Cas9 system mediating gene targeting can be used in methods for directing transgene insertion and/or for producing complex transgenic trait loci comprising multiple transgenes in a fashion similar as disclosed in WO2013/0198888 (published Aug. 1, 2013) where instead of using a double strand break inducing agent to introduce a gene of interest, a guide RNA/Cas9 system as disclosed herein is used. In one embodiment, a complex transgenic trait locus is a genomic locus that has multiple transgenes genetically linked to each other. By inserting independent transgenes within 0.1, 0.2, 0.3, 0.4, 0.5, 1.0, 2, or even 5 centimorgans (cM) from each other, the transgenes can be bred as a single genetic locus (see, for example, U.S. patent application Ser. No. 13/427,138) or PCT application PCT/US2012/030061. After selecting a plant comprising a transgene, plants containing (at least) one transgenes can be crossed to form an F1 that contains both transgenes. In progeny from these F1 (F2 or BC1) 1/500 progeny would have the two different transgenes recombined onto the same chromosome. The complex locus can then be bred as single genetic locus with both transgene traits. This process can be repeated to stack as many traits as desired.

[0241] Chromosomal intervals that correlate with a phenotype or trait of interest can be identified. A variety of methods well known in the art are available for identifying chromosomal intervals. The boundaries of such chromosomal intervals are drawn to encompass markers that will be linked to the gene controlling the trait of interest. In other words, the chromosomal interval is drawn such that any marker that lies within that interval (including the terminal markers that define the boundaries of the interval) can be used as a marker for northern leaf blight resistance. In one embodiment, the chromosomal interval comprises at least one QTL, and furthermore, may indeed comprise more than one QTL. Close proximity of multiple QTLs in the same interval may obfuscate the correlation of a particular marker with a particular QTL, as one marker may demonstrate linkage to more than one QTL. Conversely, e.g., if two markers in close proximity show co-segregation with the desired phenotypic trait, it is sometimes unclear if each of those markers identifies the same QTL or two different QTL. The term “quantitative trait locus” or “QTL” refers to a region of DNA that is associated with the differential expression of a quantitative phenotypic trait in at least one genetic background, e.g., in at least one breeding population. The region of the QTL encompasses or is closely linked to the gene or genes that affect the trait in question. An “allele of a QTL” can comprise multiple genes or other genetic factors within a contiguous genomic region or linkage group, such as a haplotype. An allele of a QTL can denote a haplotype within a specified window wherein said window is a contiguous genomic region that can be defined, and tracked, with a set of one or more polymorphic markers. A haplotype can be defined by the unique fingerprint of alleles at each marker within the specified window.

[0242] A variety of methods are available to identify those cells having an altered genome at or near a target site without using a screenable marker phenotype. Such methods can be viewed as directly analyzing a target sequence to detect any change in the target sequence, including but not limited to PCR methods, sequencing methods, nuclease digestion, Southern blots, and any combination thereof.

[0243] Proteins may be altered in various ways including amino acid substitutions, deletions, truncations, and insertions. Methods for such manipulations are generally known. For example, amino acid sequence variants of the protein(s) can be prepared by mutations in the DNA. Methods for mutagenesis and nucleotide sequence alterations include, for example, Kunkel, (1985) Proc. Natl. Acad. Sci. USA 82:488-92; Kunkel et al., (1987) Meth Enzymol 154:367-82; U.S. Pat. No. 4,873,192; Walker and Gaastra, eds. (1983) Techniques in Molecular Biology (MacMillan Publishing Company, New York) and the references cited therein. Guidance regarding amino acid substitutions not likely to affect biological activity of the protein is found, for example, in the model of Dayhoff et al., (1978) Atlas of Protein Sequence and Structure (Natl Biomed Res Found, Washington, D.C.). Conservative substitutions, such as exchanging one amino acid with another having similar properties, may be preferable. Conservative deletions, insertions, and amino acid substitutions are not expected to produce radical changes in the characteristics of the protein, and the effect of any substitution, deletion, insertion, or combination thereof can be evaluated by routine screening assays. Assays for double-strand-break-inducing activity are known and generally measure the overall activity and specificity of the agent on DNA substrates containing target sites.

[0244] A variety of methods are known for the introduction of nucleotide sequences and polypeptides into an organism, including, for example, transformation, sexual crossing, and the introduction of the polypeptide, DNA, or mRNA into the cell.

[0245] Methods for contacting, providing, and/or introducing a composition into various organisms are known and include but are not limited to, stable transformation methods, transient transformation methods, virus-mediated methods, and sexual breeding. Stable transformation indicates that the introduced polynucleotide integrates into the genome of the organism and is capable of being inherited by progeny thereof. Transient transformation indicates that the introduced composition is only temporarily expressed or present in the organism.

[0246] Protocols for introducing polynucleotides and polypeptides into plants may vary depending on the type of plant or plant cell targeted for transformation, such as monocot or dicot. Protocols for introducing polynucleotides, polypeptides or polynucleotide-protein complexes (PGEN, RGEN) into eukaryotic cells, such as plants or plant cells are known and include microinjection (Crossway et al., (1986) Biotechniques 4:320-34 and U.S. Pat. No. 6,300,543), meristem transformation (U.S. Pat. No. 5,736,369), electroporation (Riggs et al., (1986) Proc. Natl. Acad. Sci. USA 83:5602-6, Agrobacterium-mediated transformation (U.S. Pat. Nos. 5,563,055 and 5,981,840), direct gene transfer (Paszkowski et al., (1984) EMBO J 3:2717-22), and ballistic particle acceleration (U.S. Pat. Nos. 4,945,050; 5,879,918; 5,886,244; 5,932,782; Tomes et al., (1995) “Direct DNA Transfer into Intact Plant Cells via Microprojectile Bombardment” in Plant Cell, Tissue, and Organ Culture: Fundamental Methods, ed. Gamborg & Phillips (Springer-Verlag, Berlin); McCabe et al., (1988) Biotechnology 6:923-6; Weissinger et al., (1988) Ann Rev Genet 22:421-77; Sanford et al., (1987) Particulate Science and Technology 5:27-37 (onion); Christou et al., (1988) Plant Physiol 87:671-4 (soybean); Finer and McMullen, (1991) In Vitro Cell Dev Biol 27P:175-82 (soybean); Singh et al., (1998) Theor Appl Genet 96:319-24 (soybean); Datta et al., (1990) Biotechnology 8:736-40 (rice); Klein et al., (1988) Proc. Natl. Acad. Sci. USA 85:4305-9 (maize); Klein et al., (1988) Biotechnology 6:559-63 (maize); U.S. Pat. Nos. 5,240,855; 5,322,783 and 5,324,646; Klein et al., (1988) Plant Physiol 91:440-4 (maize); Fromm et al., (1990) Biotechnology 8:833-9 (maize); Hooykaas-Van Slogteren et al., (1984) Nature 311:763-4; U.S. Pat. No. 5,736,369 (cereals); Bytebier et al., (1987) Proc. Natl. Acad. Sci. USA 84:5345-9 (Liliaceae); De Wet et al., (1985) in The Experimental Manipulation of Ovule Tissues, ed. Chapman et al., (Longman, New York), pp. 197-209 (pollen); Kaeppler et al., (1990) Plant Cell Rep 9:415-8) and Kaeppler et al., (1992) Theor Appl Genet 84:560-6 (whisker-mediated transformation); D'Halluin et al., (1992) Plant Cell 4:1495-505 (electroporation); Li et al., (1993) Plant Cell Rep 12:250-5; Christou and Ford (1995) Annals Botany 75:407-13 (rice) and Osjoda et al., (1996) Nat Biotechnol 14:745-50 (maize via Agrobacterium tumefaciens).

[0247] Alternatively, polynucleotides may be introduced into plants by contacting plants with a virus or viral nucleic acids. Generally, such methods involve incorporating a polynucleotide within a viral DNA or RNA molecule. In some examples a polypeptide of interest may be initially synthesized as part of a viral polyprotein, which is later processed by proteolysis in vivo or in vitro to produce the desired recombinant protein. Methods for introducing polynucleotides into plants and expressing a protein encoded therein, involving viral DNA or RNA molecules, are known, see, for example, U.S. Pat. Nos. 5,889,191, 5,889,190, 5,866,785, 5,589,367 and 5,316,931. Transient transformation methods include, but are not limited to, the introduction of polypeptides, such as a double-strand break inducing agent, directly into the organism, the introduction of polynucleotides such as DNA and/or RNA polynucleotides, and the introduction of the RNA transcript, such as an mRNA encoding a double-strand break inducing agent, into the organism. Such methods include, for example, microinjection or particle bombardment. See, for example Crossway et al., (1986) Mol Gen Genet 202:179-85; Nomura et al., (1986) Plant Sci 44:53-8; Hepler et al., (1994) Proc. Natl. Acad. Sci. USA 91:2176-80; and, Hush et al., (1994) J Cell Sci 107:775-84.

[0248] The term “dicot” refers to the subclass of angiosperm plants also knows as “dicotyledoneae” and includes reference to whole plants, plant organs (e.g., leaves, stems, roots, etc.), seeds, plant cells, and progeny of the same. Plant cell, as used herein includes, without limitation, seeds, suspension cultures, embryos, meristematic regions, callus tissue, leaves, roots, shoots, gametophytes, sporophytes, pollen, and microspores.

[0249] The term “crossed” or “cross” or “crossing” in the context of this disclosure means the fusion of gametes via pollination to produce progeny (i.e., cells, seeds, or plants). The term encompasses both sexual crosses (the pollination of one plant by another) and selfing (self-pollination, i.e., when the pollen and ovule (or microspores and megaspores) are from the same plant or genetically identical plants).

[0250] The term “introgression” refers to the transmission of a desired allele of a genetic locus from one genetic background to another. For example, introgression of a desired allele at a specified locus can be transmitted to at least one progeny plant via a sexual cross between two parent plants, where at least one of the parent plants has the desired allele within its genome. Alternatively, for example, transmission of an allele can occur by recombination between two donor genomes, e.g., in a fused protoplast, where at least one of the donor protoplasts has the desired allele in its genome. The desired allele can be, e.g., a transgene, a modified (mutated or edited) native allele, or a selected allele of a marker or QTL.

[0251] Standard DNA isolation, purification, molecular cloning, vector construction, and verification/characterization methods are well established, see, for example Sambrook et al., (1989) Molecular Cloning: A Laboratory Manual, (Cold Spring Harbor Laboratory Press, NY). Vectors and constructs include circular plasmids, and linear polynucleotides, comprising a polynucleotide of interest and optionally other components including linkers, adapters, regulatory or analysis. In some examples a recognition site and/or target site can be contained within an intron, coding sequence, 5′ UTRs, 3′ UTRs, and/or regulatory regions.

[0252] The present disclosure further provides expression constructs for expressing in a plant, plant cell, or plant part a guide RNA/Cas9 system that is capable of binding to and creating a double strand break in a target site. In one embodiment, the expression constructs of the disclosure comprise a promoter operably linked to a nucleotide sequence encoding a Cas9 gene and a promoter operably linked to a guide RNA of the present disclosure. The promoter is capable of driving expression of an operably linked nucleotide sequence in a plant cell.

[0253] A phenotypic marker is a screenable or selectable marker that includes visual markers and selectable markers whether it is a positive or negative selectable marker. Any phenotypic marker can be used. Specifically, a selectable or screenable marker comprises a DNA segment that allows one to identify, or select for or against a molecule or a cell that contains it, often under particular conditions. These markers can encode an activity, such as, but not limited to, production of RNA, peptide, or protein, or can provide a binding site for RNA, peptides, proteins, inorganic and organic compounds or compositions and the like.

[0254] Examples of selectable markers include, but are not limited to, DNA segments that comprise restriction enzyme sites; DNA segments that encode products which provide resistance against otherwise toxic compounds including antibiotics, such as, spectinomycin, ampicillin, kanamycin, tetracycline, Basta, neomycin phosphotransferase II (NEO) and hygromycin phosphotransferase (HPT)); DNA segments that encode products which are otherwise lacking in the recipient cell (e.g., tRNA genes, auxotrophic markers); DNA segments that encode products which can be readily identified (e.g., phenotypic markers such β-galactosidase, GUS; fluorescent proteins such as green fluorescent protein (GFP), cyan (CFP), yellow (YFP), red (RFP), and cell surface proteins); the generation of new primer sites for PCR (e.g., the juxtaposition of two DNA sequence not previously juxtaposed), the inclusion of DNA sequences not acted upon or acted upon by a restriction endonuclease or other DNA modifying enzyme, chemical, etc.; and, the inclusion of a DNA sequences required for a specific modification (e.g., methylation) that allows its identification.

[0255] Additional selectable markers include genes that confer resistance to herbicidal compounds, such as glufosinate ammonium, bromoxynil, imidazolinones, and 2,4-dichlorophenoxyacetate (2,4-D). See for example, Yarranton, (1992) Curr Opin Biotech 3:506-11)

[0256] The cells having the introduced sequence may be grown or regenerated into plants using conventional conditions, see for example, McCormick et al., (1986) Plant Cell Rep 5:81-4. These plants may then be grown, and either pollinated with the same transformed strain or with a different transformed or untransformed strain, and the resulting progeny having the desired characteristic and/or comprising the introduced polynucleotide or polypeptide identified. Two or more generations may be grown to ensure that the polynucleotide is stably maintained and inherited, and seeds harvested.

[0257] Any plant can be used, including monocot and dicot plants. Examples of monocot plants that can be used include, but are not limited to, corn (Zea mays), rice (Oryza sativa), rye (Secale cereale), sorghum (Sorghum bicolor, Sorghum vulgare), millet (e.g., pearl millet (Pennisetum glaucum), proso millet (Panicum miliaceum), foxtail millet (Setaria italica), finger millet (Eleusine coracana)), wheat (Triticum aestivum), sugarcane (Saccharum spp.), oats (Avena), barley (Hordeum), switchgrass (Panicum virgatum), pineapple (Ananas comosus), banana (Musa spp.), palm, ornamentals, turfgrasses, and other grasses. Examples of dicot plants that can be used include, but are not limited to, soybean (Glycine max), canola (Brassica napus and B. campestris), alfalfa (Medicago sativa), tobacco (Nicotiana tabacum), Arabidopsis (Arabidopsis thaliana), sunflower (Helianthus annuus), cotton (Gossypium arboreum), and peanut (Arachis hypogaea), tomato (Solanum lycopersicum), potato (Solanum tuberosum) etc.

[0258] The transgenes, recombinant DNA molecules, DNA sequences of interest, and polynucleotides of interest can comprise one or more genes of interest. Such genes of interest can encode, for example, a protein that provides agronomic advantage to the plant.

[0259] The meaning of abbreviations is as follows: “sec” means second(s), “min” means minute(s), “h” means hour(s), “d” means day(s), “A” means microliter(s), “mL” means milliliter(s), “L” means liter(s), “μM” means micromolar, “mM” means millimolar, “M” means molar, “mmol” means millimole(s), “μmole” mean micromole(s), “g” means gram(s), “μg” means microgram(s), “ng” means nanogram(s), “U” means unit(s), “bp” means base pair(s) and “kb” means kilobase(s).
[0260] Non-limiting examples of compositions and methods disclosed herein are as follows:
[0261] 1. A single guide RNA capable of forming a guide RNA/Cas9 endonuclease complex, wherein said guide RNA/Cas9 endonuclease complex can recognize, bind to, and optionally nick or cleave a target sequence, wherein said single guide RNA is selected from the group consisting of SEQ ID NOs: 185-207, a functional fragment of SEQ ID NOs: 185-207, and a functional variant of SEQ ID NOs: 185-207.
[0262] 2. A single guide RNA capable of forming a guide RNA/Cas9 endonuclease complex, wherein said guide RNA/Cas9 endonuclease complex can recognize, bind to, and optionally nick or cleave a target sequence, wherein said single guide RNA comprises a chimeric non-naturally occurring crRNA linked to a tracrRNA, wherein said tracrRNA comprises a nucleotide sequence selected from the group consisting of SEQ ID NOs: 139-184, a functional fragment of SEQ ID NOs: 139-184, and a functional variant of SEQ ID NOs: 139-184.
[0263] 3. A single guide RNA capable of forming a guide RNA/Cas9 endonuclease complex, wherein said guide RNA/Cas9 endonuclease complex can recognize, bind to, and optionally nick or cleave a target sequence, wherein said single guide RNA comprises a chimeric non-naturally occurring crRNA linked to a tracrRNA, wherein said chimeric non-naturally occurring crRNA comprises a nucleotide sequence selected from the group consisting of SEQ ID NOs: 116-138, a functional fragment of SEQ ID NOs: 116-138, and a functional variant of SEQ ID NOs: 116-138.
[0264] 4. A guide RNA capable of forming a guide RNA/Cas9 endonuclease complex, wherein said guide RNA/Cas9 endonuclease complex can recognize, bind to, and optionally nick or cleave a target sequence, wherein said guide RNA is a duplex molecule comprising a chimeric non-naturally occurring crRNA and a tracrRNA, wherein said chimeric non-naturally occurring crRNA comprises a variable targeting domain capable of hybridizing to said target sequence, wherein said tracrRNA comprises a nucleotide sequence selected from the group consisting of SEQ ID NOs: 139-184, a functional fragment of SEQ ID NOs: 139-184, and a functional variant of SEQ ID NOs: 139-184, wherein said chimeric non-naturally occurring crRNA comprises a variable targeting domain capable of hybridizing to said target sequence.
[0265] 5. A guide RNA capable of forming a guide RNA/Cas9 endonuclease complex, wherein said guide RNA/Cas9 endonuclease complex can recognize, bind to, and optionally nick or cleave a target sequence, wherein said guide RNA is a duplex molecule comprising a chimeric non-naturally occurring crRNA and a tracrRNA, wherein said chimeric non-naturally occurring crRNA comprises a nucleotide sequence selected from the group consisting of SEQ ID NOs: 116-138, a functional fragment of SEQ ID NOs: 116-138, and a functional variant of SEQ ID NOs: 116-138, wherein said chimeric non-naturally occurring crRNA comprises a variable targeting domain capable of hybridizing to said target sequence.
[0266] 6. A guide RNA/Cas9 endonuclease complex comprising a Cas9 endonuclease selected from the group consisting of SEQ ID NOs: 47-69, a functional fragment of SEQ ID NOs: 47-69, and a functional variant of SEQ ID NOs: 47-69, and at least one guide RNA, wherein said guide RNA/Cas9 endonuclease complex is capable of recognizing, binding to, and optionally nicking or cleaving all or part of a target sequence.
[0267] 7. A guide RNA/Cas9 endonuclease complex comprising at least one guide RNA and a Cas9 endonuclease, wherein said Cas9 endonuclease is encoded by a DNA sequence selected from the group consisting of SEQ ID NOs: 24-46, a functional fragment of SEQ ID NOs: 24-46, and a functional variant of SEQ ID NOs: 24-46, wherein said guide RNA/Cas9 endonuclease complex is capable of recognizing, binding to, and optionally nicking or cleaving all or part of a target sequence.
[0268] 8. The guide RNA/Cas9 endonuclease complex of any of embodiments 6-7 comprising at least one guide RNA of any one of embodiments 1-5.
[0269] 9. The guide RNA/Cas9 endonuclease complex of any of embodiments 6-7, wherein said target sequence is located in the genome of a cell.
[0270] 10. A method for modifying a target site in the genome of a cell, the method comprising introducing into said cell at least one guide RNA and at least one Cas9 endonuclease selected from the group consisting of SEQ ID NOs: 47-69, a functional fragment of SEQ ID NOs: 47-69, and a functional variant of SEQ ID NOs: 47-69, wherein said guide RNA and Cas9 endonuclease can form a complex that is capable of recognizing, binding to, and optionally nicking or cleaving all or part of said target site.
[0271] 11. The method of embodiment 10, further comprising identifying at least one cell that has a modification at said target, wherein the modification at said target site is selected from the group consisting of (i) a replacement of at least one nucleotide, (ii) a deletion of at least one nucleotide, (iii) an insertion of at least one nucleotide, and (iv) any combination of (i)-(iii).
[0272] 12. A method for editing a nucleotide sequence in the genome of a cell, the method comprising introducing into said cell a polynucleotide modification template, at least one guide RNA and at least one Cas9 endonuclease selected from the group consisting of SEQ ID NOs: 47-69, a functional fragment of SEQ ID NOs: 47-69, and a functional variant of SEQ ID NOs: 47-69, wherein said polynucleotide modification template comprises at least one nucleotide modification of said nucleotide sequence, wherein said guide RNA and Cas9 endonuclease can form a complex that is capable of recognizing, binding to, and optionally nicking or cleaving all or part of said target site.
[0273] 13. A method for modifying a target site in the genome of a cell, the method comprising introducing into said cell at least one guide RNA, at least one donor DNA, and at least one Cas9 endonuclease selected from the group consisting of SEQ ID NOs: 47-69, a functional fragment of SEQ ID NOs: 47-69, and a functional variant of SEQ ID NOs: 47-69, wherein said at least one guide RNA and at least one Cas9 endonuclease can form a complex that is capable of recognizing, binding to, and optionally nicking or cleaving all or part of said target site, wherein said donor DNA comprises a polynucleotide of interest.
[0274] 14. The method of embodiment 13, further comprising identifying at least one cell that has said polynucleotide of interest integrated in or near said target site.
[0275] 15. The method of any one of embodiments 10-14, wherein the cell is selected from the group consisting of a human, non-human, animal, bacterial, fungal, insect, yeast, non-conventional yeast, and plant cell.
[0276] 16. The method of embodiment 15, wherein the plant cell is selected from the group consisting of a monocot and dicot cell.
[0277] 17. The method of embodiment 16, wherein the plant cell is selected from the group consisting of maize, rice, sorghum, rye, barley, wheat, millet, oats, sugarcane, turfgrass, or switchgrass, soybean, canola, alfalfa, sunflower, cotton, tobacco, peanut, potato, tobacco, Arabidopsis, and safflower cell.
[0278] 18. A plant comprising a modified target site, wherein said plant originates from a plant cell comprising a modified target site produced by the method of any of embodiments 10-17.
[0279] 19. A plant comprising an edited nucleotide, wherein said plant originates from a plant cell comprising an edited nucleotide produced by the method of embodiment 12.

### EXAMPLES

[0280] In the following Examples, unless otherwise stated, parts and percentages are by weight and degrees are Celsius. It should be understood that these Examples, while indicating embodiments of the disclosure, are given by way of illustration only. From the above discussion and these Examples, one skilled in the art can make various changes and modifications of the disclosure to adapt it to various usages and conditions. Such modifications are also intended to fall within the scope of the appended claims.

### Example 1

### Characterization of New Cas9 Endonucleases and Cognate Guide RNAs

[0281] CRISPR-Cas loci from uncharacterized Type II CRISPR-Cas systems were identified by searching internal Pioneer-DuPont databases consisting of microbial genomes as described below. First, multiple sequence alignment of protein sequences from a diverse collection of Cas9 endonucleases was performed using MUSCLE (Edgar R. (2004) Nucleic Acids Res. 32(5): 1792-97). The alignments were examined and curated and were used to build profile hidden Markov models (HMM) for Cas9 sub-families using HMMER (Eddy S. R. (1998) Bioinformatics 14:755-763; Eddy S. R. (2011) PLoS Comp. Biol., 7:e1002195). The resulting HMM models were then utilized to search protein sequences translated from DNA sequence collections for the presence of cas9-like genes. The resulting genes were further validated as encoding a Cas9 protein by examining the translated amino acid sequence for the presence of HNH and RuvC cleavage domains. To further validate the gene as encoding a Cas9 protein, the other structural components of a Type II CRISPR-Cas system (Makarova et al. (2015) Nat. Rev. Microbiol. 13:722-736) (cas1 gene, cas2 gene, CRISPR array and tracrRNA encoding region) were identified in the DNA locus. Cas1 and cas2 genes were identified by examining the protein translations of open-reading-frames (ORFs) 201 nucleotides within the CRISPR-Cas locus against the NCBI protein database for those matching known Cas1 and Cas2 proteins using the PSI-BLAST program (Altschul, S. F. et al. (2005) FEBS J. 272:5101-5109.). The CRISPR array was detected using the PILER-CR program (Edgar R. (2007) BMC Bioinformatics 8:18. Additional CRISPR array repeats not detected by PILER-CR were identified by performing pairwise alignments of the locus with the PILER-CR identified repeats using the blastn program (Altschul, S. F. et al. (1997) Nucleic Acids Res. 25:3389-3402). The tracrRNA encoding region, termed the anti-repeat, was established by searching the locus for regions (distinct from the CRISPR array) with complete to partial homology to the repeats in the CRISPR array. In total, 23 DNA regions (Locus 6 to Locus 28, respectively) were selected (Table 2).

TABLE 2
List of sequence for Type 11 CRISPR-Cas
loci identified from Pioneer-Dupont databases.

| CRISPR-Cas | | |
|---|---|---|
| locus name | Genus/species of Origin | SEQ ID NO: |
| Locus 6 | Bacillus cereus | 1 |
| Locus 7 | Brevibacillus laterosporus | 2 |
| Locus 8 | Bacillus species | 3 |
| Locus 9 | Bacillus cereus | 4 |
| Locus 10 | Lactobacillus fermentum | 5 |
| Locus 11 | Enterococcus faecalis | 6 |
| Locus 12 | Bacillus cereus | 7 |
| Locus 13 | Enterococcus faecalis | 8 |
| Locus 14 | Unknown | 9 |
| Locus 15 | Enterococcus faecalis | 10 |
| Locus 16 | Metagenomic | 11 |
| Locus 17 | Chryseobacterium species | 12 |
| Locus 18 | Metagenomic | 13 |
| Locus 19 | Metagenomic | 14 |
| Locus 20 | Unknown | 15 |
| Locus 21 | Metagenomic | 16 |
| Locus 22 | Metagenomic | 17 |
| Locus 23 | Metagenomic | 18 |
| Locus 24 | Metagenomic | 19 |
| Locus 25 | Metagenomic | 20 |
| Locus 26 | Metagenomic | 21 |
| Locus 27 | Metacenomic | 22 |
| Locus 28 | Metagenomic | 23 |

[0282] A schematic of the DNA locus for each system is depicted in FIGS. 1-23. The cas9 gene open-reading-frame (cas9 gene ORF), accessory protein gene ORF (e.g. Cas1, Cas2, and when present Csn2), CRISPR array with CRISPR repeats, and anti-repeat (the genomic DNA region demonstrating partial homology to the CRISPR array repeat that indicates the location of the encoded tracrRNA) are indicated.

[0283] The genomic DNA sequence and length of each cas9 gene ORF and cas9 gene translation (not including the stop codon) are referenced in Table 3 for each system. Table 4 lists the consensus sequence of the CRISPR array repeats from the DNA locus of each system and the sequences of the anti-repeat for each system (as DNA sequence on the same strand as the cas9 gene ORF).

TABLE 3
Sequence and length of the cas9 gene ORF and cas9 gene translation
from each Type II CRISPR-Cas system identified as described herein.

| | | | | Length of |
|---|---|---|---|---|
| | | | Translation of | cas9 Gene |
| | | | cas9 Gene ORF | Translation |
| Cas9 | | Length of | (not including | (No. of |
| endonuclease | cas9 Gene ORF | cas9 Gene | the stop codon) | Amino |
| name | (SEQ ID NO:) | ORF (bp) | (SEQ ID NO) | Acids) |
| Cas-Locus 6 | 24 | 3282 | 47 | 1093 |
| Cas-Locus 7 | 25 | 3279 | 48 | 1092 |
| Cas-Locus 8 | 26 | 3213 | 49 | 1070 |
| Cas-Locus 9 | 27 | 3246 | 50 | 1081 |
| Cas-Locus 10 | 28 | 4137 | 51 | 1378 |
| Cas-Locus 11 | 29 | 4014 | 52 | 1337 |
| Cas-Locus 12 | 30 | 4014 | 53 | 1337 |
| Cas-Locus 13 | 31 | 4014 | 54 | 1337 |
| Cas-Locus 14 | 32 | 3993 | 55 | 1330 |
| Cas-Locus 15 | 33 | 3453 | 56 | 1150 |
| Cas-Locus 16 | 34 | 4371 | 57 | 1456 |
| Cas-Locus 17 | 35 | 4389 | 58 | 1462 |
| Cas-Locus 18 | 36 | 4323 | 59 | 1440 |
| Cas-Locus 19 | 37 | 4323 | 60 | 1440 |
| Cas-Locus 20 | 38 | 4323 | 61 | 1440 |
| Cas-Locus 21 | 39 | 3702 | 62 | 1233 |
| Cas-Locus 22 | 40 | 3807 | 63 | 1268 |
| Cas-Locus 23 | 41 | 3795 | 64 | 1264 |
| Cas-Locus 24 | 42 | 4395 | 65 | 1464 |
| Cas-Locus 25 | 43 | 4377 | 66 | 1458 |
| Cas-Locus 26 | 44 | 3384 | 67 | 1127 |
| Cas-Locus 27 | 45 | 3327 | 68 | 1108 |
| Cas-Locus 28 | 46 | 3327 | 69 | 1108 |

TABLE 4
CRISPR repeat consensus and anti-repeat (putative tracrRNA coding
region) for diverse Type II CRISPR-Cas systems described herein.

| | CRISPR | | | Anti- | |
|---|---|---|---|---|---|
| | repeat | | | Repeat | |
| CRISPR- | consensus | CRISPR | CRISPR Array | Consensus | Anti- |
| Cas locus | (SEQ | repeat | Transcriptional | (SEQ | Repeat |
| name | ID NO) | length | Direction | ID NO) | Direction |
| Locus 6 | 70 | 36 | Anti-sense | 93 | Sense |
| Locus 7 | 71 | 36 | Anti-sense | 94 | Sense |
| Locus 8 | 72 | 36 | Anti-sense | 95 | Sense |
| Locus 9 | 73 | 36 | Anti-sense | 96 | Sense |
| Locus 10 | 74 | 36 | Sense | 97 | Anti-sense |
| Locus 11 | 75 | 36 | Sense | 98 | Anti-sense |
| Locus 12 | 76 | 36 | Sense | 99 | Anti-sense |
| Locus 13 | 77 | 36 | Sense | 100 | Anti-sense |
| Locus 14 | 78 | 36 | Sense | 101 | Anti-sense |
| Locus 15 | 79 | 36 | Sense | 102 | Sense |
| Locus 16 | 80 | 47 | Anti-sense | 103 | Anti-sense |
| Locus 17 | 81 | 47 | Anti-sense | 104 | Anti-sense |
| Locus 18 | 82 | 47 | Anti-sense | 105 | Anti-sense |
| Locus 19 | 83 | 47 | Anti-sense | 106 | Anti-sense |
| Locus 20 | 84 | 47 | Anti-sense | 107 | Anti-sense |
| Locus 21 | 85 | 47 | Anti-sense | 108 | Anti-sense |
| Locus 22 | 86 | 47 | Anti-sense | 109 | Anti-sense |
| Locus 23 | 87 | 46 | Anti-sense | 110 | Anti-sense |
| Locus 24 | 88 | 36 | Sense | 111 | Anti-sense |
| Locus 25 | 89 | 36 | Sense | 112 | Anti-sense |
| Locus 26 | 90 | 36 | Sense | 113 | Anti-sense |
| Locus 27 | 91 | 36 | Anti-sense | 114 | Anti-sense |
| Locus 28 | 92 | 36 | Anti-sense | 115 | Anti-sense |

[0284] The possible transcriptional directions of the putative tracrRNAs for each new system were considered by examining the secondary structures and possible termination signals present in a RNA version of the sense and anti-sense genomic DNA sequences surrounding the anti-repeat (as described in U.S. patent applications 62/162,377 filed May 15, 2015, 62/162,353 filed May 15, 2015 and 62/196,535 filed Jul. 24, 2015, all three applications incorporated in their entirety herein by reference). Based on the hairpin-like secondary structures and termination signals present for each system, the transcriptional direction of the tracrRNA for all the Type II CRISPR-Cas systems can be deduced. Because the anti-repeat in the tracrRNA can hybridize to the crRNA derived from the CRISPR array to form a duplexed RNA capable of guiding the Cas9 endonuclease to cleave invading DNA the transcriptional direction of the CRISPR array may also be determined based on the direction of tracrRNA transcription (since double-stranded RNA hybridizes with 5′ to 3′ directionality). The transcriptional directions of both the tracrRNA and CRISPR array were deduced for each system as described above and are listed in Table 4 and depicted in FIGS. 1-23. Based on the likely transcriptional direction of the tracrRNA and CRISPR array, single guide RNAs (sgRNAs, SEQ ID NOs: 185-207) were designed and are shown in Table 5.

TABLE 5
Examples of sgRNAs (SEQ ID NOs: 185-207)
and its components (VT, crRNA repeat, loop,
anti-repeat and 3′tracrRNA) for each new diverse
Type II CRISPR-Cas endonuclease described herein.

| | | | | | | Single |
|---|---|---|---|---|---|---|
| | | crRNA | | Anti- | 3′tracr | guide |
| Cas | Variable | repeat | | Repeat | RNA | RNA |
| endo- | targeting | (SEQ | | (SEQ | (SEQ | (sgRNA) |
| nuclease | domain | ID | | ID | ID | SEQ |
| name | (VT) | NO) | Loop | NO) | NO) | ID NO: |
| Cas-Locus 6 | N_{20 (*)} | 116 | N_{4 (**)} | 139 | 162 | 185 |
| Cas-Locus 7 | N_{20 (*)} | 117 | N_{4 (**)} | 140 | 163 | 186 |
| Cas-Locus 8 | N_{20 (*)} | 118 | N_{4 (**)} | 141 | 164 | 187 |
| Cas-Locus 9 | N_{20 (*)} | 119 | N_{4 (**)} | 142 | 165 | 188 |
| Cas-Locus 10 | N_{20 (*)} | 120 | N_{4 (**)} | 143 | 166 | 189 |
| Cas-Locus 11 | N_{20 (*)} | 121 | N_{4 (**)} | 144 | 167 | 190 |
| Cas-Locus 12 | N_{20 (*)} | 122 | N_{4 (**)} | 145 | 168 | 191 |
| Cas-Locus 13 | N_{20 (*)} | 123 | N_{4 (**)} | 146 | 169 | 192 |
| Cas-Locus 14 | N_{20 (*)} | 124 | N_{4 (**)} | 147 | 170 | 193 |
| Cas-Locus 15 | N_{20 (*)} | 125 | N_{4 (**)} | 148 | 171 | 194 |
| Cas-Locus 16 | N_{20 (*)} | 126 | N_{4 (**)} | 149 | 172 | 195 |
| Cas-Locus 17 | N_{20 (*)} | 127 | N_{4 (**)} | 150 | 173 | 196 |
| Cas-Locus 18 | N_{20 (*)} | 128 | N_{4 (**)} | 151 | 174 | 197 |
| Cas-Locus 19 | N_{20 (*)} | 129 | N_{4 (**)} | 152 | 175 | 198 |
| Cas-Locus 20 | N_{20 (*)} | 130 | N_{4 (**)} | 153 | 176 | 199 |
| Cas-Locus 21 | N_{20 (*)} | 131 | N_{4 (**)} | 154 | 177 | 200 |
| Cas-Locus 22 | N_{20 (*)} | 132 | N_{4 (**)} | 155 | 178 | 201 |
| Cas-Locus 23 | N_{20 (*)} | 133 | N_{4 (**)} | 156 | 179 | 202 |
| Cas-Locus 24 | N_{20 (*)} | 134 | N_{4 (**)} | 157 | 180 | 203 |
| Cas-Locus 25 | N_{20 (*)} | 135 | N_{4 (**)} | 158 | 181 | 204 |
| Cas-Locus 26 | N_{20 (*)} | 136 | N_{4 (**)} | 159 | 182 | 205 |
| Cas-Locus 27 | N_{20 (*)} | 137 | N_{4 (**)} | 160 | 183 | 206 |
| Cas-Locus 28 | N_{20 (*)} | 138 | N_{4 (**)} | 161 | 184 | 207 |

N_{20 (*)} indicates a series of 20 nucleotides as one example of a sg RNA variable targeting domain. As described herein, the variable targeting domain of a sgRNA can vary for example, but not limiting from at least 12 to 30 nucleotides.
N_{4 (**)} indicates a loop of 4 nucleotides such as but not limiting to GAAA. As described herein, the length of the loop can vary from at least 3 nucleotides to 100 nucleotides.

[0285] Rapid in vitro methods to characterize the protospacer adjacent motif (PAM) specificity of Type II Cas9 proteins have been described (see U.S. patent applications 62/162,377 filed May 15, 2015, 62/162,353 filed May 15, 2015 and 62/196,535 filed Jul. 24, 2015, incorporated in their entirety herein by reference) and can be used to characterize the PAM preference of the novel CRISPR-Cas systems described herein.

[0286] The single guide RNAs described herein (Table 5) can be complexed with the respective purified Cas9 protein (for example SEQ ID NO: 185—Table 5—can be complexed with the Cas-Locus 6 endonuclease protein of SEQ ID NO: 47—Table 3) and assayed for their ability to support cleavage of a randomized PAM plasmid DNA library (as described in Example 7 of U.S. patent application 62/162,377 filed May 15, 2015). If the sgRNA does not support cleavage activity, new guide RNA designs (either sgRNA or duplexed crRNA and tracrRNA; in both possible transcriptional directions of the CRISPR array and anti-repeat region) will be tested for their ability to support cleavage.

[0287] Once a guide RNA that supports Cas9 cleavage has been established, the PAM specificity of each Cas9 endonuclease can be assayed (as described in Examples 4, 8, 14 and 15 U.S. patent application 62/162,377 filed May 15, 2015). PAM preferences which extend past the randomized PAM region may also be examined (as described in Example 11 U.S. patent application 62/162,377 filed May 15, 2015). After PAM preferences have been determined, the sgRNAs may be further refined for maximal activity or cellular transcription by either increasing or decreasing the tracrRNA 3′ end tail length, increasing or decreasing crRNA repeat and tracrRNA anti-repeat length, modifying the 4 nt self-folding loop or altering the sequence composition. The guide RNA solutions provided in Table 5 supported target recognition and cleavage for all of the Type II Cas9s examined (Cas-Locus 9, Cas-Locus 14, Cas-Locus 15, Cas-Locus 24, Cas-Locus 26, Cas-Locus 27 and Cas-Locus 28). Digestion of randomized PAM libraries followed by the capture and analysis of the PAM sequences which supported cleavage activity as described previously (see Examples 4, 8, 14 and 15 from U.S. patent application 62/162,377 filed May 15) yielded the PAM recognition profiles shown in Tables 6-12.

[0288] Taken together, the Type II Cas9 proteins combined with the guide polynucleotide solutions listed in Table 5 were capable of programmable RNA directed DNA target recognition and cleavage.

### Example 2

### Identification of Amino Acid Domains of Novel Cas9 Systems of the Present Disclosure

[0289] Multiple functional domains and conserved elements were determined for each of the novel Cas9 endonuclease proteins of the present disclosure. Tables 13-14 show the domain location of the HNH, RuvC-I, RuvC-II, RuvC-III, REC1, REC1′, REC-2, Bridge-Helix (BH) and PAM interacting (PI) domains along the amino acid sequence of each Cas9 endonuclease.

[0290] The novel Cas9 endonucleases of the present disclosure comprised an HNH domain, an RuvC domain that included three subdomains (RuvC-I, Ruvc-II and RuvC-II), a Brige Helicx domain a PAM interacting domain and DNA/RNA recognition regions including REC1 and REC1′. The REC1 binds to repeat:anti-repeat RNA duplex of the guide RNA while REC1′ mainly interacts with targetDNA:guide RNA hybrid duplex. The REC2 domain is a conserved element.

TABLE 13
Location of RuvC-I, BH, REC1 and REC2 domains of
novel Cas9 endonucleases of the present disclosure relative
to their respective Cas9 amino acid sequence.

| | Length of AA | | | | |
|---|---|---|---|---|---|
| Cas9 | sequence | RuvC-I | BH | REC1 | REC2 |
| Locus-6 | 1093 | 1-41 | 42-81 | 82-233 | None |
| (SEQ ID NO: 47) | | | | | |
| Locus-7 | 1092 | 1-41 | 42-81 | 82-232 | None |
| (SEQ ID NO: 48) | | | | | |
| Locus-8 | 1070 | 1-53 | 54-93 | 94-245 | None |
| (SEQ ID NO: 49) | | | | | |
| Locus-9 | 1081 | 1-41 | 42-81 | 82-231 | None |
| (SEQ ID NO: 50) | | | | | |
| Locus-10 | 1378 | 1-45 | 46-80 | 81-176 | 177-332 |
| (SEQ ID NO: 51) | | | | | |
| Locus-11 | 1337 | 1-58 | 59-93 | 94-176 | 177-312 |
| (SEQ ID NO: 52) | | | | | |
| Locus-12 | 1337 | 1-58 | 59-93 | 94-176 | 177-312 |
| (SEQ ID NO: 53) | | | | | |
| Locus-13 | 1337 | 1-58 | 59-93 | 94-176 | 177-312 |
| (SEQ ID NO: 54) | | | | | |
| Locus-14 | 1330 | 1-58 | 59-97 | 98-180 | 181-310 |
| (SEQ ID NO: 55) | | | | | |
| Locus-15 | 1150 | 1-40 | 41-75 | 76-257 | None |
| (SEQ ID NO: 56) | | | | | |
| Locus-16 | 1456 | 1-68 | 69-114 | 115-409 | undefined |
| (SEQ ID NO: 57) | | | | | |
| Locus-17 | 1462 | 1-80 | 81-126 | 127-431 | undefined |
| (SEQ ID NO: 58) | | | | | |
| Locus-18 | 1440 | 1-45 | 46-91 | 92-396 | undefined |
| (SEQ ID NO: 59) | | | | | |
| Locus-19 | 1440 | 1-45 | 46-91 | 92-396 | undefined |
| (SEQ ID NO: 60) | | | | | |
| Locus-20 | 1440 | 1-45 | 46-91 | 92-396 | undefined |
| (SEQ ID NO: 61) | | | | | |
| Locus-21 | 1233 | 1-13* | 14-59 | 60-207 | None |
| (SEQ ID NO: 62) | | | | | |
| Locus-22 | 1268 | 1-47 | 47-93 | 94-244 | None |
| (SEQ ID NO: 63) | | | | | |
| Locus-23 | 1264 | 1-45 | 46-91 | 92-239 | None |
| (SEQ ID NO: 64) | | | | | |
| Locus-24 | 1464 | 1-43 | 44-85 | 86-346 | undefined |
| (SEQ ID NO: 65) | | | | | |
| Locus-25 | 1458 | 1-43 | 44-85 | 86-347 | undefined |
| (SEQ ID NO: 66) | | | | | |
| Locus-26 | | | | | |
| (SEQ ID NO: 67) | 1127 | 1-44 | 42-85 | 86-262 | None |
| Locus-27 | 1108 | 1-41 | 45-86 | 87-241 | None |
| (SEQ ID NO: 68) | | | | | |
| Locus-28 | | | | | |
| (SEQ ID NO: 69) | 1108 | 1-44 | 45-86 | 87-241 | None |

*This RuvC domain is missing a N-terminal fragment

TABLE 14
Location of REC1', RuvC-II, HNH, RuvC-III and PAM interacting (PI)
domains of novel Cas9 endonucleases of the present disclosure relative
to their respective Cas9 amino acid sequence.

| Cas9 | REC1' | RuvC-II | HNH | RuvC-III | PI |
|---|---|---|---|---|---|
| Locus-6 | 234-463 | 464-508 | 509-664 | 665-810 | 811-1093 |
| (SEQ ID NO: 47) | | | | | |
| Locus-7 | 233-462 | 463-707 | 508-663 | 664-809 | 810-1092 |
| (SEQ ID NO: 48) | | | | | |
| Locus-8 | 246-473 | 474-519 | 520-683 | 684-808 | 809-1070 |
| (SEQ ID NO: 49) | | | | | |
| Locus-9 | 231-460 | 461-505 | 506-660 | 661-808 | 809-1081 |
| (SEQ ID NO: 50) | | | | | |
| Locus-10 | 333-748 | 749-796 | 750-944 | 945-1101 | 1102-1378 |
| (SEQ ID NO: Si) | | | | | |
| Locus-11 | 313-729 | 730-777 | 778-930 | 931-1084 | 1085-1337 |
| (SEQ ID NO: 52) | | | | | |
| Locus-12 | 313-729 | 730-777 | 778-930 | 931-1084 | 1085-1337 |
| (SEQ ID NO: 53) | | | | | |
| Locus-13 | 313-729 | 730-777 | 778-930 | 931-1084 | 1085-1337 |
| (SEQ ID NO: 54) | | | | | |
| Locus-14 | 311-719 | 720-770 | 771-922 | 923-1104 | 1105-1330 |
| (SEQ ID NO: 55) | | | | | |
| Locus-15 | 258-470 | 471-517 | 517-690 | 691-848 | 849-1150 |
| (SEQ ID NO: 56) | | | | | |
| Locus-16 | undefined | 691-743 | 744-950 | 921-1178 | 1179-1456 |
| (SEQ ID NO: 57) | | | | | |
| Locus-17 | undefined | 711-764 | 765-971 | 972-1199 | 1200-1462 |
| (SEQ ID NO: 58) | | | | | |
| Locus-18 | undefined | 677-729 | 720-936 | 936-1164 | 1165-1440 |
| (SEQ ID NO: 59) | | | | | |
| Locus-19 | undefined | 677-729 | 720-936 | 936-1164 | 1165-1440 |
| (SEQ ID NO: 60) | | | | | |
| Locus-20 | undefined | 677-729 | 720-936 | 936-1164 | 1165-1440 |
| (SEQ ID NO: 61) | | | | | |
| Locus-21 | 208-474 | 475-521 | 522-704 | 705-892 | 893-1233 |
| (SEQ ID NO: 62) | | | | | |
| Locus-22 | 245-511 | 512-558 | 559-741 | 742-929 | 930-1268 |
| (SEQ ID NO: 63) | | | | | |
| Locus-23 | 240-506 | 507-553 | 554-736 | 737-924 | 925-1264 |
| (SEQ ID NO: 64) | | | | | |
| Locus-24 | undefined | 734-780 | 781-965 | 966-1163 | 1164-1464 |
| (SEQ ID NO: 65) | | | | | |
| Locus-25 | undefined | 728-774 | 775-969 | 970-1157 | 1158-1458 |
| (SEQ ID NO: 66) | | | | | |
| Locus-26 | 262-515 | 516-573 | 574-728 | 729-868 | 869-1127 |
| (SEQ ID NO: 67) | | | | | |
| Locus-27 | 242-497 | 498-543 | 543-718 | 719-886 | 887-1108 |
| (SEQ ID NO: 68) | | | | | |
| Locus-28 | 242-497 | 498-543 | 544-718 | 719-886 | 887-1108 |
| (SEQ ID NO: 69) | | | | | |

Length refers to the total amino acids of each Cas9 endonuclease protein.

[0291] The number range shown for each Cas9 endonuclease domain (RuvC-I, Bridge Helix (BH), REC1, REC2, REC1′, RuvC-II, HNH, RuvC-III and PAM interacting (PI)) indicates the location of the first amino acid and last amino acid of that domain relative to the amino acid sequence of its respective Cas9 endonuclease. For example, the RuvCI domain of Cas-Locus-6 (1-41) comprises 41 amino acids spanning from the first amino acid (amino acid 1) to the 41^{st} amino acid of the Cas9 endonuclease (Cas-Locus6) of SEQ ID NO: 11. None indicates that no REC2 domain is present is said Cas9 endonuclease.

### Example 3

### Transformation of Maize Immature Embryos

[0292] Transformation can be accomplished by various methods known to be effective in plants, including particle-mediated delivery, Agrobacterium-mediated transformation, PEG-mediated delivery, and electroporation.

[0293] a. Particle-mediated delivery

[0294] Transformation of maize immature embryos using particle delivery is performed as follows. Media recipes follow below.

[0295] The ears are husked and surface sterilized in 30% Clorox bleach plus 0.5% Micro detergent for 20 minutes, and rinsed two times with sterile water. The immature embryos are isolated and placed embryo axis side down (scutellum side up), 25 embryos per plate, on 560Y medium for 4 hours and then aligned within the 2.5-cm target zone in preparation for bombardment. Alternatively, isolated embryos are placed on 560L (Initiation medium) and placed in the dark at temperatures ranging from 26° C. to 37° C. for 8 to 24 hours prior to placing on 560Y for 4 hours at 26° C. prior to bombardment as described above.

[0296] Plasmids containing the double strand brake inducing agent and donor DNA are constructed using standard molecular biology techniques and co-bombarded with plasmids containing the developmental genes ODP2 (AP2 domain transcription factor ODP2 (Ovule development protein 2); US20090328252 A1) and Wushel (US2011/0167516).

[0297] The plasmids and DNA of interest are precipitated onto 0.6 μm (average diameter) gold pellets using a water-soluble cationic lipid transfection reagent as follows. DNA solution is prepared on ice using 1 μg of plasmid DNA and optionally other constructs for co-bombardment such as 50 ng (0.5 μl) of each plasmid containing the developmental genes ODP2 (AP2 domain transcription factor ODP2 (Ovule development protein 2); US20090328252 A1) and Wushel. To the pre-mixed DNA, 20 μl of prepared gold particles (15 mg/ml) and 5 μl of a water-soluble cationic lipid transfection reagent is added in water and mixed carefully. Gold particles are pelleted in a microfuge at 10,000 rpm for 1 min and supernatant is removed. The resulting pellet is carefully rinsed with 100 ml of 100% EtOH without resuspending the pellet and the EtOH rinse is carefully removed. 105 μl of 100% EtOH is added and the particles are resuspended by brief sonication. Then, 10 μl is spotted onto the center of each macrocarrier and allowed to dry about 2 minutes before bombardment.

[0298] Alternatively, the plasmids and DNA of interest are precipitated onto 1.1 μm (average diameter) tungsten pellets using a calcium chloride (CaCl₂) precipitation procedure by mixing 100 μl prepared tungsten particles in water, 10 μl (1 μg) DNA in Tris EDTA buffer (1 μg total DNA), 100 μl 2.5 M CaCl2, and 10 μl 0.1 M spermidine. Each reagent is added sequentially to the tungsten particle suspension, with mixing. The final mixture is sonicated briefly and allowed to incubate under constant vortexing for 10 minutes. After the precipitation period, the tubes are centrifuged briefly, liquid is removed, and the particles are washed with 500 ml 100% ethanol, followed by a 30 second centrifugation. Again, the liquid is removed, and 105 μl of 100% ethanol is added to the final tungsten particle pellet. For particle gun bombardment, the tungsten/DNA particles are briefly sonicated. 10 μl of the tungsten/DNA particles is spotted onto the center of each macrocarrier, after which the spotted particles are allowed to dry about 2 minutes before bombardment.

[0299] The sample plates are bombarded at level #4 with a Biorad Helium Gun. All samples receive a single shot at 450 PSI, with a total of ten aliquots taken from each tube of prepared particles/DNA.

[0300] Following bombardment, the embryos are incubated on 560P (maintenance medium) for 12 to 48 hours at temperatures ranging from 26C to 37C, and then placed at 26C. After 5 to 7 days the embryos are transferred to 560R selection medium containing 3 mg/liter Bialaphos, and subcultured every 2 weeks at 26C. After approximately 10 weeks of selection, selection-resistant callus clones are transferred to 288J medium to initiate plant regeneration. Following somatic embryo maturation (2-4 weeks), well-developed somatic embryos are transferred to medium for germination and transferred to a lighted culture room. Approximately 7-10 days later, developing plantlets are transferred to 272V hormone-free medium in tubes for 7-10 days until plantlets are well established. Plants are then transferred to inserts in flats (equivalent to a 2.5″ pot) containing potting soil and grown for 1 week in a growth chamber, subsequently grown an additional 1-2 weeks in the greenhouse, then transferred to Classic 600 pots (1.6 gallon) and grown to maturity. Plants are monitored and scored for transformation efficiency, and/or modification of regenerative capabilities.

[0301] Initiation medium (560L) comprises 4.0 g/l N6 basal salts (SIGMA C-1416), 1.0 ml/l Eriksson's Vitamin Mix (1000× SIGMA-1511), 0.5 mg/l thiamine HCl, 20.0 g/l sucrose, 1.0 mg/l 2,4-D, and 2.88 g/l L-proline (brought to volume with D-1 H2O following adjustment to pH 5.8 with KOH); 2.0 g/l Gelrite (added after bringing to volume with D-I H2O); and 8.5 mg/l silver nitrate (added after sterilizing the medium and cooling to room temperature).

[0302] Maintenance medium (560P) comprises 4.0 g/l N6 basal salts (SIGMA C-1416), 1.0 ml/l Eriksson's Vitamin Mix (1000× SIGMA-1511), 0.5 mg/l thiamine HCl, 30.0 g/l sucrose, 2.0 mg/l 2,4-D, and 0.69 g/l L-proline (brought to volume with D-I H2O following adjustment to pH 5.8 with KOH); 3.0 g/l Gelrite (added after bringing to volume with D-I H2O); and 0.85 mg/l silver nitrate (added after sterilizing the medium and cooling to room temperature).

[0303] Bombardment medium (560Y) comprises 4.0 g/l N6 basal salts (SIGMA C-1416), 1.0 ml/l Eriksson's Vitamin Mix (1000× SIGMA-1511), 0.5 mg/l thiamine HCl, 120.0 g/l sucrose, 1.0 mg/l 2,4-D, and 2.88 g/l L-proline (brought to volume with D-I H2O following adjustment to pH 5.8 with KOH); 2.0 g/l Gelrite (added after bringing to volume with D-I H2O); and 8.5 mg/l silver nitrate (added after sterilizing the medium and cooling to room temperature).

Selection medium (560R) comprises 4.0 g/l N6 basal salts (SIGMA C-1416), 1.0 ml/l Eriksson's Vitamin Mix (1000× SIGMA-1511), 0.5 mg/l thiamine HCl, 30.0 g/l sucrose, and 2.0 mg/l 2,4-D (brought to volume with D-I H2O following adjustment to pH 5.8 with KOH); 3.0 g/l Gelrite (added after bringing to volume with D-I H2O); and 0.85 mg/l silver nitrate and 3.0 mg/l bialaphos (both added after sterilizing the medium and cooling to room temperature).

[0304] Plant regeneration medium (288J) comprises 4.3 g/l MS salts (GIBCO 11117-074), 5.0 ml/l MS vitamins stock solution (0.100 g nicotinic acid, 0.02 g/l thiamine HCL, 0.10 g/l pyridoxine HCL, and 0.40 g/l glycine brought to volume with polished D-I H2O) (Murashige and Skoog (1962) Physiol. Plant. 15:473), 100 mg/l myo-inositol, 0.5 mg/l zeatin, 60 g/l sucrose, and 1.0 ml/l of 0.1 mM abscisic acid (brought to volume with polished D-I H2O after adjusting to pH 5.6); 3.0 g/l Gelrite (added after bringing to volume with D-I H2O); and 1.0 mg/l indoleacetic acid and 3.0 mg/l bialaphos (added after sterilizing the medium and cooling to 60° C.). Hormone-free medium (272V) comprises 4.3 g/l MS salts (GIBCO 11117-074), 5.0 ml/l MS vitamins stock solution (0.100 g/l nicotinic acid, 0.02 g/l thiamine HCL, 0.10 g/l pyridoxine HCL, and 0.40 g/l glycine brought to volume with polished D-I H2O), 0.1 g/l myo-inositol, and 40.0 g/l sucrose (brought to volume with polished D-I H2O after adjusting pH to 5.6); and 6 g/l bacto-agar (added after bringing to volume with polished D-I H2O), sterilized and cooled to 60° C.

[0305] b. Agrobacterium-mediated transformation

[0306] Agrobacterium-mediated transformation was performed essentially as described in Djukanovic et al. (2006) Plant Biotech J 4:345-57. Briefly, 10-12 day old immature embryos (0.8-2.5 mm in size) were dissected from sterilized kernels and placed into liquid medium (4.0 g/L N6 Basal Salts (Sigma C-1416), 1.0 ml/L Eriksson's Vitamin Mix (Sigma E-1511), 1.0 mg/L thiamine HCl, 1.5 mg/L 2, 4-D, 0.690 g/L L-proline, 68.5 g/L sucrose, 36.0 g/L glucose, pH 5.2). After embryo collection, the medium was replaced with 1 ml Agrobacterium at a concentration of 0.35-0.45 OD550. Maize embryos were incubated with Agrobacterium for 5 min at room temperature, then the mixture was poured onto a media plate containing 4.0 g/L N6 Basal Salts (Sigma C-1416), 1.0 ml/L Eriksson's Vitamin Mix (Sigma E-1511), 1.0 mg/L thiamine HCl, 1.5 mg/L 2, 4-D, 0.690 g/L L-proline, 30.0 g/L sucrose, 0.85 mg/L silver nitrate, 0.1 nM acetosyringone, and 3.0 g/L Gelrite, pH 5.8. Embryos were incubated axis down, in the dark for 3 days at 20° C., then incubated 4 days in the dark at 28° C., then transferred onto new media plates containing 4.0 g/L N6 Basal Salts (Sigma C-1416), 1.0 ml/L Eriksson's Vitamin Mix (Sigma E-1511), 1.0 mg/L thiamine HCl, 1.5 mg/L 2, 4-D, 0.69 g/L L-proline, 30.0 g/L sucrose, 0.5 g/L MES buffer, 0.85 mg/L silver nitrate, 3.0 mg/L Bialaphos, 100 mg/L carbenicillin, and 6.0 g/L agar, pH 5.8. Embryos were subcultured every three weeks until transgenic events were identified. Somatic embryogenesis was induced by transferring a small amount of tissue onto regeneration medium (4.3 g/L MS salts (Gibco 11117), 5.0 ml/L MS Vitamins Stock Solution, 100 mg/L myo-inositol, 0.1 μM ABA, 1 mg/L IAA, 0.5 mg/L zeatin, 60.0 g/L sucrose, 1.5 mg/L Bialaphos, 100 mg/L carbenicillin, 3.0 g/L Gelrite, pH 5.6) and incubation in the dark for two weeks at 28° C. All material with visible shoots and roots were transferred onto media containing 4.3 g/L MS salts (Gibco 11117), 5.0 ml/L MS Vitamins Stock Solution, 100 mg/L myo-inositol, 40.0 g/L sucrose, 1.5 g/L Gelrite, pH 5.6, and incubated under artificial light at 28° C. One week later, plantlets were moved into glass tubes containing the same medium and grown until they were sampled and/or transplanted into soil.

### Example 4

### Transient Expression of BBM Enhances Transformation

[0307] Parameters of the transformation protocol can be modified to ensure that the BBM activity is transient. One such method involves precipitating the BBM-containing plasmid in a manner that allows for transcription and expression, but precludes subsequent release of the DNA, for example, by using the chemical PEI. In one example, the BBM plasmid is precipitated onto gold particles with PEI, while the transgenic expression cassette (UBI:moPAT˜GFPm:PinII; moPAT is the maize optimized PAT gene) to be integrated is precipitated onto gold particles using the standard calcium chloride method.

[0308] Briefly, gold particles were coated with PEI as follows. First, the gold particles were washed. Thirty-five mg of gold particles, 1.0 in average diameter (A.S.I. #162-0010), were weighed out in a microcentrifuge tube, and 1.2 ml absolute EtOH was added and vortexed for one minute. The tube was incubated for 15 minutes at room temperature and then centrifuged at high speed using a microfuge for 15 minutes at 4oC. The supernatant was discarded and a fresh 1.2 ml aliquot of ethanol (EtOH) was added, vortexed for one minute, centrifuged for one minute, and the supernatant again discarded (this is repeated twice). A fresh 1.2 ml aliquot of EtOH was added, and this suspension (gold particles in EtOH) was stored at −20oC for weeks. To coat particles with polyethylimine (PEI; Sigma #P3143), 250 μl of the washed gold particle/EtOH mix was centrifuged and the EtOH discarded. The particles were washed once in 100 μl ddH2O to remove residual ethanol, 250 μl of 0.25 mM PEI was added, followed by a pulse-sonication to suspend the particles and then the tube was plunged into a dry ice/EtOH bath to flash-freeze the suspension, which was then lyophilized overnight. At this point, dry, coated particles could be stored at −80oC for at least 3 weeks. Before use, the particles were rinsed 3 times with 250 μl aliquots of 2.5 mM HEPES buffer, pH 7.1, with 1× pulse-sonication, and then a quick vortex before each centrifugation. The particles were then suspended in a final volume of 250 μl HEPES buffer. A 25 μl aliquot of the particles was added to fresh tubes before attaching DNA. To attach uncoated DNA, the particles were pulse-sonicated, then 1 μg of DNA (in 5 μl water) was added, followed by mixing by pipetting up and down a few times with a Pipetteman and incubated for 10 minutes. The particles were spun briefly (i.e. 10 seconds), the supernatant removed, and 60 μl EtOH added. The particles with PEI-precipitated DNA-1 were washed twice in 60 μl of EtOH. The particles were centrifuged, the supernatant discarded, and the particles were resuspended in 45 μl water. To attach the second DNA (DNA-2), precipitation using a water-soluble cationic lipid transfection reagent was used. The 45 μl of particles/DNA-1 suspension was briefly sonicated, and then 5 μl of 100 ng/μl of DNA-2 and 2.5 μl of the water-soluble cationic lipid transfection reagent were added. The solution was placed on a rotary shaker for 10 minutes, centrifuged at 10,000 g for 1 minute. The supernatant was removed, and the particles resuspended in 60 μl of EtOH. The solution was spotted onto macrocarriers and the gold particles onto which DNA-1 and DNA-2 had been sequentially attached were delivered into scutellar cells of 10 DAP Hi-II immature embryos using a standard protocol for the PDS-1000. For this experiment, the DNA-1 plasmid contained a UBI:RFP:pinII expression cassette, and DNA-2 contained a UBI:CFP:pinII expression cassette. Two days after bombardment, transient expression of both the CFP and RFP fluorescent markers was observed as numerous red & blue cells on the surface of the immature embryo. The embryos were then placed on non-selective culture medium and allowed to grow for 3 weeks before scoring for stable colonies. After this 3-week period, 10 multicellular, stably-expressing blue colonies were observed, in comparison to only one red colony. This demonstrated that PEI-precipitation could be used to effectively introduce DNA for transient expression while dramatically reducing integration of the PEI-introduced DNA and thus reducing the recovery of RFP-expressing transgenic events. In this manner, PEI-precipitation can be used to deliver transient expression of BBM and/or WUS2.

[0309] For example, the particles are first coated with UBI:BBM:pinII using PEI, then coated with UBI:moPAT˜YFP using a water-soluble cationic lipid transfection reagent, and then bombarded into scutellar cells on the surface of immature embryos. PEI-mediated precipitation results in a high frequency of transiently expressing cells on the surface of the immature embryo and extremely low frequencies of recovery of stable transformants Thus, it is expected that the PEI-precipitated BBM cassette expresses transiently and stimulates a burst of embryogenic growth on the bombarded surface of the tissue (i.e. the scutellar surface), but this plasmid will not integrate. The PAT˜GFP plasmid released from the Ca++/gold particles is expected to integrate and express the selectable marker at a frequency that results in substantially improved recovery of transgenic events. As a control treatment, PEI-precipitated particles containing a UBI:GUS:pinII (instead of BBM) are mixed with the PAT˜GFP/Ca++ particles. Immature embryos from both treatments are moved onto culture medium containing 3 mg/l bialaphos. After 6-8 weeks, it is expected that GFP+, bialaphos-resistant calli will be observed in the PEI/BBM treatment at a much higher frequency relative to the control treatment (PEI/GUS).

[0310] As an alternative method, the BBM plasmid is precipitated onto gold particles with PEI, and then introduced into scutellar cells on the surface of immature embryos, and subsequent transient expression of the BBM gene elicits a rapid proliferation of embryogenic growth. During this period of induced growth, the explants are treated with Agrobacterium using standard methods for maize (see Example 1), with T-DNA delivery into the cell introducing a transgenic expression cassette such as UBI:moPAT˜GFPm:pinII. After co-cultivation, explants are allowed to recover on normal culture medium, and then are moved onto culture medium containing 3 mg/l bialaphos. After 6-8 weeks, it is expected that GFP+, bialaphos-resistant calli will be observed in the PEI/BBM treatment at a much higher frequency relative to the control treatment (PEI/GUS).

It may be desirable to “kick start” callus growth by transiently expressing the BBM and/or WUS2 polynucleotide products. This can be done by delivering BBM and WUS2 5′-capped polyadenylated RNA, expression cassettes containing BBM and WUS2 DNA, or BBM and/or WUS2 proteins. All of these molecules can be delivered using a biolistics particle gun. For example 5′-capped polyadenylated BBM and/or WUS2 RNA can easily be made in vitro using Ambion's mMessage mMachine kit. RNA is co-delivered along with DNA containing a polynucleotide of interest and a marker used for selection/screening such as Ubi:moPAT˜GFPm:PinII. It is expected that the cells receiving the RNA will immediately begin dividing more rapidly and a large portion of these will have integrated the agronomic gene. These events can further be validated as being transgenic clonal colonies because they will also express the PAT˜GFP fusion protein (and thus will display green fluorescence under appropriate illumination). Plants regenerated from these embryos can then be screened for the presence of the polynucleotide of interest.

The application's sequence listing, which the Patent Office published only in electronic form, follows.

SEQUENCE LISTING (207 sequences)

SEQ ID NO: 1 - DNA, 7342 bp, Bacillus cereus
  misc_feature (5412)..(5467): n is a, c, g, or t
acgaaggatcattttaaaaaaactgaacaatcataatcaacaatactgttaaaatcggaccactaaggctaaataatgtcgaaatgaatttagagttattatattgcgacataaaaaagataaccgaacccaaaatagtaataataggtacaatgattgctctcatagcaaggaaatagagtggaacggcgaaaatacttcctaatacgatgaaaaaaaatgtacaaagatgccaacttattattgttctttttcgaaaaatataaagtaaaaaccacccaaagatacaacaaacataattaaataaggtaacaaaccaaagaatactctgaaaactcgatgttcttaaatcagtaaaatcaatcgtaggacttaatacatatataaacaaaataattagattagcaaaaaacagggataatcctgctccagacaagtatgatcgcatttaaatcataacccccttacattaatattaattattataccataaaatgggttttgtttaatggttcttaatcttactaacgtgtaaattttgaaatgttaggtttttaaataagagtataaacatcgggcaattggcagatgaactaagggtagctagggaacaggagaaaaagaacgaaggctaggttattaacgtgtcataattttcaataataaatatataaaataaatatataaaataaatatataaaataaatatataaatgagattgacttcgatgatatatggatataaaatgaaagtatcatatcatatcaagttttggtaagttgctatagtaagggcaacagacccgaggcgttggggatcgcctagcccgtttttacgggctctccctatattcaaaataatgacaaacgagcaccttggagaatttatttccgaggtgcttttttttctaggagggatagaatggcatacacaatgggaatagatgtggggattgcttcgtgtggatgggctattgtagatcttgaaagacaacgaataatagatctaggtgttcggacttttgagaaagcagagaatccgaaaaatggagaggctcttgctgtaccaaggagagaagctagatcgagccgtaggagattacggagaaaaaaacatcgcattgaaagattaaagcatatgtttattcggaatggactggcggttgatattcaacatcttgagcagcagacgttacgtagccaaaatgaaatagatgtatggcaattacgagtagatggtttggatcgaatgctaactcaaaaagagtggcttcgtgtattaattcatcttgcacaacgtcgtggttttcaatcaaatcgaaaaacagatggttcaagtgaagatgggcaggttcttgtaaatgtaacggagaatgacagattaatggaagagaaagattatcgaaccgtagcggaaatgatggtaaaagatgaaaaattctctgaccataagcgaaataaaaatggaaattatcatggagtagtgagcagagcttctttattagttgaaatacatacattatttgaatcccaaagacagcaccataattttttggcatcgaaagatttcgagctggaatatgttaatatttggtcttcacaacggcctgttgcaacaaaagatcaaatagaaaaaatgattggtacatgtactttcttaccgaaagaaaagagaactccaaaggcatcttggcattttcaatattttatgctcttgcaaacgatcaatcatatccgtataacaaatatacaaggcacgagatcattgaataaagaagaaattgaacaagtggtcaatatggcacttaccaaatcaaaggtatcttaccatgatattagaaaagtccttgatttatcagaagaatatcaatttgttggcttggattatggaaaagagaatgaaaaaaagaaagttgaaagtaaggaaacgatcatcaaattagatgattaccataagttaaataaaatttttaatgaagtggaattagctaaaggagaagcttggaaagctgttgattatgatacagtagcgtatgctctcactttctttaaagatgatgaagatattagagattatttgcaaaataaatataaagatagtaaaaatcgtcttgttaagaacgtagctaataaagaatacacaaatgaattggtagaaaaagtgagtacgctatcttttcgtaaagtggggcatttatcattgaaagccttacgaaagatcatcccgtttttggagcaaggcatgacctatgataaagcgtgccaagcggctggttttaactttcaaggtatatcaaaaaagaagagatctgttgtcttgccggtcattgaccaaatttccaacccagtagtaaatcgtgctcttactcaaacgcgtaaagtaattaatgctctaatcaaaaaatatggttcacctgaaaccatacacattgaaacagcaagagagttatcaaagagatttgatgaacgaaagaatattactaaggattataaggagaatagagacaagaacgaacgtgcaaaaaaacacttatcggaattagggattattaatcctactggtcttgatatagtaaagtacaagctgtggtgtgagcaacaagggcgctgtatgtacagcaaccaacccatctcctttgaaagactgagagaatcaggttataccgaggtagatcacattattccatacagccgaagtatgaatgatagttataacaatcgcgtattggttatgactagggaaaatcgtgaaaagagtaatcaaactccttatgaatatatgggtaatgatacgcaaagatgggatgagtttgaacaaagagtcacaacaaatccacaaataaaaaaggagaaacgacagaacctcttgctaaaaggattcactaatcgtcgggaattagaaatgttagaaagaaacttaaatgatacacgttatataactaagtatctttcacattttattagtacgaatttggaattctctcctagtgataaaaagaaaaaggtagttaatacaagcggtcgtatcacttcccatttaagaagtagatggggattagaaaaaaatcgtgagcaaaatgatttacaccatgcaatggacgcggttgtaattgctgtcacctcagactcgtttattcaacaggtaacgaactactataaacggaaagaaagaagagagttgaatagggatgataagttccctctaccttggaagttttttagagaagaagtcatagcaagattaagccctaatccaaaagaacaaattgaagcattgcccaaccatttttatagcgaagatgaacttgctgatcttcaaccgatttttgtgtcaagaatgcccaagcgtagtataactggagaggcgcatcaggcacagtttcgccgagttgtgggtaaaacgaaagagggtaaaaatattactgcaaagaaaactgctttagttgatattagctatgataaaaatggtgattttaatatgtatggaagagaaacagatcctgctacttatgaagcaattaaagaaagatatctcgaatttggaggaaatgctaaaaaagcattttcaacggatttacataaaccgaaaaaagatggcaccaaagggccactgataaaatctgtgagaataatggaaaataaaacattggtacatcccgtaaataaaggaaaaggtgttgtgtataacagctctattgtaaggacagatgtatttcaaagaaaagagaaatattatttactacctgtgtacgtaacagatgtaaccaaagggaaactaccaaataaggtgattgttgctaaaaagggatacgatgattggattgaggttgatgatagcttcacatttttatacagtctatatccgaatgatttaatattcatcagacaaaatccaaaaaagaaaatatcattaaaaaaacgtattgagagtcattctatttctgatagtaaagaggttcaagaaattcttgcctattataaaggggttgatagttcaactgctgctatagagtttattactcatgatggtagttactatgcaaaaggtgttggtgtccaaaatctagattgttttgaaaaatatcaagttgatactctgggtaattattccaaagtgaaaggagaaaaacgacttgagttggagacatctgataataacgacaaaggcaaagatgtcaattcgattaaatcaactagtcgttaaacaagaagaagaggttaccatacctcttgaagatatcgcatctattgtggttgaagaaaatcaagttgtgttaacagctgctctattaagtaaatgcagtgaatatggaattggtttgtatacttgcgatgaaaagcatttacccaatggtttgttacttccctttcagagtcattcaaggcaattaagggtacttgaaacccaatataacctttcaaagccatttaaaaaaagagtgtggcaaaaaataattacaactaagataatgaatcaagcattgtgcttatcttatttggataaaaccggagaaagtgaactgcttgcaattcgcaataccgttgattcaggtgactctacgaatagagaggcatatgctgctaaagtttattttcaacatttgtttgggaaacggtttattcgaagggaagaccatataataaaccactccctcaattatggttattcgatccttagaggaaatgtagctagagttttagtacagtatggattctttccatgtctaggaattgaccatcacaatgaaaataacgcatttaatttagctgatgattttatggaggtttttcgcccattggttgatttatttgtcgtgaaacattttcatgaggagatggaatttacaccgaagtggagagcaggattgtataatgtagtgaatcatcaagttgaactagaaggtgaaagatattcctgtaatcgagctattgaagaaatgattaaaagctacgttacagcatgcagaacaaatatgtatgagagactgagaacaccaacattactccctttgaagattcattcatatgagtaaatatatgcgaatacttgtcttttttgatctaccggtgaaaaggaagcaggatcgtaaggcttactgtgcatttagaaagtttttaatagcagatggatatgatatgctccagttttcagtctattctcgaatttgtaatggcaatgaaggaacacataagcatttggaaaggctgtcacgtaatttgccctcaaagggttcggtacgatcgttgattattactgaaaagcaatatgaaaagatgaaattttttgttgggaaaccaaaaataaaagaagagaaagtaaacagtgtgcaactaacatttttctgaaaaagaaaattattaataggaagaaaggagtttttcttacctttttaaaataccaaaagccttgannnnnnnnnnnnnnnnnnnnnnnnnnnnnnnnnnnnnnnnnnnnnnnnnnnnnnnnctttcaaggctttttgggcacgtatcatatcatatcgagttttagtaaggaactatagcagaaacggattagtcaatttgtcgatatgatcatatcatatcgagttttagtaaggaactatagctgttctgatggaatgaactggactttcgtcatcatatcatatcgagttttagtaaggaactatagcctttatgggcggtcactgccgggatattcaatcatatcatatcgagttttagtaaggaactatagctttaatcattgcagttgctaagaaaattctatcatatcatatcgagttttagtaaggaactatagcagtcgtatacaagtatggactctcgaaatgatcatatcatatcgagttttagtaaggaactatagcatggatttttagtttgattcccgatatgaaatcatatcatatcgagttttagtaaggaactatagcttggggtcacgtataatcaaaccacgatcaatcatatcatatcgagttttagtaaggaactatagcagaatcagcaagatcactacgaaagcgaaaatcatatcatatcgagttttagtaaggaactatagctttctttgctcccttctccattcttggtgaatcatatcatatcgagttttagtaaggaactatagcaacgaaacaaccggggtgtcatctatatttatcatatcatatcgagttttagtaaggaactatagcgcgagaggatgaggacggactttatcgtttatcatatcatatcgagttttagtaaggaactatagcttacgatgctatttcgatgggggatggtttatcatatcatatcgagttttagtaaggaactatagccatgacgttagaccagttgaaagatttttgatcatatcatatcgagttttagtaaggaactatagcaatcgtgctggattggatcgctggatatcgatcatatcatatcgagttttagtaaggaactatagcacggtgccagcagggaaagcggccagaagaatcatatcatatcgagttttagtaaggaactatagcaactccagccctatgcaaaggctgtatgggatcatatcatatcgagttttagtaaggaactatagcacagttagatatatactgtcaggtatctttatcatatcatatcgagttttagtaaggaactatagcttagattgctctaactgatttagctgaagcatcatatcatatcgagttttagtaaggaactatggtctattgggtattatccaaatcactatcctactcaaaccccagacggatagtcttttttattaataaacatgtaattttacccattgcttaatctcctcatcatttaataaaataggaacacacattcgtatttagggagatgttttaatggctagtaaaattcttgacccacttgtaacgaagtttattttgccagaacatgcagaaatgttacgtcagtatcatgaggataagaagctgatcgagaagccgttcattgaagaggatgagctggccgagttttgctacaggatatctgactcacgtcagtatgactatgcattaaccattagttggtggaaagaggcaaaagaaggtagaggcgtgatagaatccgcttggggatgggtagataagtttgattctcaatttaaacagattaagctaaaaaacgatgaggatttctggtggattcctgtagaagatgtagtgagtgtggaagcctaagcagagaatcttataactgcatatagtgtattgcctgtgggaacagggatacagcaaacaccccactattaatagcctagtggggtgtttgcatttaacattcaatagcgttgcaagcggttcggcttattcattgcatcaat

SEQ ID NO: 2 - DNA, 7342 bp, Brevibacillus laterosporus; identical to SEQ ID NO: 1
  misc_feature (5412)..(5467): n is a, c, g, or t

SEQ ID NO: 3 - DNA, 5877 bp, Artificial Sequence
  Bacilllus species seqeunce
gcccaaaatgaagttaggttcatacataaattgtttggaattgcatcataatatgtcattgaacagttcatgtaggtttcaatgtctctatcaaatgatttttgcaccagaacccttttttatgttatacccatttccactgaaatttcaagaaaaaattgttataatacgagacattattaatgattattttaatggtttttactctaaatcacagagaatattataccagattcttgttattccttctgaagactacccatatttctgtgttttttatttgaaaaatctgatatttttgttatgatagaggtatcatggtacagcaatggctttgatgtttctatgataagggctttggcccgtggcgtaggggatcgcctgcccattttaatgggcttctccccatctatttaatgagagttttacaaccttggctattcttaaatagctaaggtttttttgtatacatataaattaaaagaggtgagattatgagagagttggattatcgcatcggattagatattggaacgaattctattggctggggtgttattgaattatcttggaacaaagatagagaacaatatgagaaagcgagaattgtcgacaagggtgttcgtatgtttgataaggctgaaatacctaagactggtgcttctcttgctgaaccgaggcgtatagcgcgctcatcacgtagaaggttaaatcgcaaaagccagagaaaaaaagatatacgtaatttacttgttcaacatgaaattattagccaaaaagaattagcttcgttatatcctctgtcaaaaagttcaatggatatttgggatattcgtttggatggattagatcgcttgttagaccgttttgaatgggctcgactattaattcatttagcacaaaaacgcggttttaaatcaaatcgaaagtctgaactgaaagatgtggagacaggaaaagtattatcaagtattcaagcaaatgaaaaacgattatctctgtaccgtacagtgggagagatgtggatgaagaatatggattttagtaaatatggcaaaaggcgtaattctcctaatgagtatgtattttcggttagccgtgcagatttagaaaaggaaattgtgactctatttgaagcgcaaagaaaatttcattcatcatatgcatcggttgatttacaaaaaacatatttacgaatttgggcacaccaactcccttttgcttctgggaatgcaattgtaaataaagtaggatattgttcattattaaaaggtaaagaaaagagagttccgaaagcaacatatacttttcaatatttcaatacactagatcaaataaaccgaacacgattagggcctgatttccaaccatttacgaaggaacagagagacattattttagataaaatgtttcaacggacagattattataaaaaaaagacaatacccgaagttacttactatgatattcggaaatggttagcactagatgaaacaattcaatttaaaggacttacctatgacccaaacgaagagctgaaaaaaatagaattgaaaccctttattaatttaaagccattttatgaaattaaaaaggtagttactaattacgcccaaaaaacaaatgaggtattctcaacattagactatgatacagttgcatatgctttaacagtttataaaacggacaaagatattagatcttatttgaagagatctaataatttatcaaaacgttgctatgatgatcaattaatagaagagctattaactctctcctatacaaagtttggtcatttatcatttaaagcaattaatcatgtactgccaattatgcaagagggaaggacttatcaggaagcaataaaccaattaggatatgataccactaatcttaaaaaagaaaacagaagtatgttcttgcctcttattccagatgagataacaaatccaattgttaaaagagcgctaactcaagcacgtaaagttgtaaatgctattattagaagatatggttctccaaattctgttcatattgaactagctcgtgagctttctaaaagtcatgacgagagaaagaaaataatgacagctcatgatgaaaattataagaaaaataaaggagctatatcaattttgatcgagaatggaattttaaatccgacaggatatgatattgtgcgttataagttatggaaagagcaaggagaacgatgtgcttattcgttaaaaaagattcctgctaatacgttttttaatgaattgaaaaaagagcgaagtggccctccggttctagaggtagatcacattttaccgtatagtcagagttttattgatagttaccataataaagtattagtttatggggatgagaatcaaaaaaagggaaatcgaattccatatacttttttttcagaagaaaataaggagtgggaaagctttgaaagctacgtaagatcgaatagttttttttctaaaaagaagcgcggatatttattgaaaaaagcttacttgccaagagagagtaacctgattaaggagcgtcatttaaatgatacccgatatgctagtagctatttgaaaaatttcattgagaaaaatttaaaatttaaagaagctgaaggtattacacgaaaaaaacatgtacagacggttaacggtgtaattacagcccatctgcgaaaaagatggggcttagaaaaagataggcaggaaacatatttgcatcatgcaatggacgctattattgttgcttgtacagatcatcatatggtcactaaagtaacggagtactatcaaataaaagaaagtaataagtcaataaagaaaccgtattttcctttgccatggatgggctttagagaggaaattttatcacatttagaaagtcagccaattgctagaaaaattagtgaggaacttaaaattggatatcaatcatctgattatatacttgtatcgcgaatgccaaaaagatctgtcactggatcagctcatgaccagacagtcatgaaaaaaggcggtatcgataaaaaaggaaagactattatcataaagcgtgtgcacttaaaggatattaagtttgatgagaatggcgattttaaaatggttggaaaagaacaagatttagcaacttacgaagcgataaagcaaagatatttagagtatggaaaagaatcgaaaaaagcatttgaaacacctttatacaagcctagtaaaaaaggaaaaggaaacctcattaaaaaaattaaagtagaagtgcaaaccaaatcttttgttcgagaagttaatgggggcgtagctcaaaatggtgatttagtaagaatagatctgtttgaaaaggataataggtattatatggtacctatttacgtagtagatactgttcgttccgaactaccaaataaagctgtaaaaagcagtaaaggctatgagcaatggctaacaatagataacagctttacgttcaaattcagtttatattcttatgatttagtacgacttgtaaaaggtgatgaagatcgtttcctatactttagtactcttgatattaattcggaccgtcttaattttaaagatgtaaataagccatcaaagcaggctgaatatcgttatagtcttaaaacaattgagaatttagaaaaatatgaggttggtgttttaggtgatttaaggttagtgagacaagaaacacgtaaaattttttaatagataaaaattaaagagattttaacacggtaagtaacattagtttgtttaccgtatttttttgtcttttttcgtctagaatactagataataagtattactaggagggatttaaatgggatggcggcatgttatgattacaaaaaatgctcgtttatctattaagcattctcaattagttgtacaacaagaagaaatagcaacaatcccactacaagatattgcttctattcttattgaagatttagctgttacgcttactgcaagtgtacttagtaaatgtgccgagtataaaattagtttaattgcgtgtaattctaagaaacttccaaatggtattttgactagtttttaacagcattctcgccaattgacagttttgaatatgcagttaaatcttgcaaaacctcttaaaaaaaggatatggcaacaaattatttgccgaaaaattatgaatcaagcactttgtttagaatacttgaattgtggaggcgcatatgaattgaataaaattgtaaagaccgtagaatctggagatacctctaatcgtgaagcatatgcagcaaagcaatattttcgatatttatttagtgattcttttacacgtcgttccgaaaatcctataaaccggttgttgaattatggatacgctattataagaagtgcagtagcacgttcattaactaattatggttttttcacatgtttaggaattcgtcataataatcagttaaattcgttcaatttagcagacgatttcatggaagtatttcgtcctatagtagatcaatacgtaattcaacaagacccagaaaactgggatttctctgtacgtgcaggtcttgtgaatttattaaacatagatgttaacataaatggtgagttgcgttcagttacaacggctattgatgatatggtaaaaagttttatagcttgttgtcgtcaagaaacaacttcttaccttaaactaccagaattgctccctattagggtgcatcaatatgagtaaatatatgagaatcttattgttttttgatttacctgtaaagacgaaaacggaaagacgggattatgttcggtttagaaattatttactaaatgaggggtttgacatgatacagttctctgtatattgtcgtttatgtaatggtcatgaatctatggagcgtcaattaggcaagataaaaacaagacttccgtctaaagggtctatcagagcattacctgtaaccgaaaaacaatttgagcggatgaggttattattaggagaaataacaacaaacgaaagaagagtgaatattaatcaattaacactgttctaatatgaacttaccatgtatagaaaaattttatcatggaaaaactagtatgtttgtgtataaggtaattatgaaacggcaatactgttaaataactatagttgttcaaggactctgttttatgaaaaacaacaaaatggaggataactcactctatataggttaaaaaataaaaaacagaaagcctgtaagcattgatattacaggcttttttgaatacgtatcataatacagcaatggctttaatggaactatgaccgtaaagtagcttatagcaaacggacagtaatcataatacagcaatggctttaatggaactatgacaaaaaggctactcttaaatgtgtagtctttatcataatacagcaatggctttaatggaactatgacgacctttggcagggaagttgcgaggaactgatcataatacagcaatggctttaatggaactatgaccgatgcatcaagtttaaggcgatcggataaatcataatacagcaacggctttaatggaactatgacaatttgttccaatgatggaatgcatatatgatcaaaatgtctctttaattttacggagtaactcaattccttttttatgttataacaaatcatacgtattcttcaagcctgagtatattactttgaaggtgtagcatgtgatctgtcccttatctcagcacaaaactgttccatctgttgttctgtgaatttttcttcttttatatccccaaacgttgctgaaccaaggaatacttcatcatcacagttgatatcccaggactcaaaaggtttctctccttttgaaactttcttagtgaatcgcatccattcgccatcaatgtatacta

SEQ ID NO: 4 - DNA, 5684 bp, Bacillus cereus
agcttcaagctttgcgtggtgagaattaaggttatcatagcatagcgatgtttcttttggaactatagcagtttttcatcactatctgatactttcttaatatcatagcatagcgatgtttcttttggaactatagcctagatggcttatccctttcagaaggcttgatcatagcatagcgatgtttcttttggaactatagcaacatgacttggttgcattacgaaagtttcatcatagcatagcgatgtttcttgtggaactatagcatcagctaacatgcgtaagtaatccctaatatcatagcatagccatgtttcttgtggaattatagctcagacttatcttccttcttcatttcttgtatcacatcatagcgatgttttctatggaattataatctcacattgtacgtaatgcaaaacataaaaattaaatcatagcatagcgatttttcttttggaattatagtacttccctaagtcttgcaggaaacatattaatcacatcatagcgatgtttttttggaattatagctaaactccaattggagaactccatttatttatcacatcgtagcgatgattcttttggaattatagattacagcggtaaaatattacatataaaattcatataactattattcccatttgcttcatttttataattatacgtttatctaggtataaagtttatttttggtgtcaataatgaaactataaggatcatatcatagcgatgtttcttaagttattatagtaagggcaatgacccgtggcgtttggggatcgccttatcctgtatggatattctccccatgttaaaagcacctacgcataacgctatggtgcttttattttgtaaaacatgaaggaggttgttaatttgaaatacgtattaggattggatattggaatcgcatcttgtggttgggctgtaataaatcaagaaaaacatagaattgaagatttaggggtacgtatttttgataaagctgagcaccctaaagatggaaaatccttagcagcaccaagacgtgaatctcgctctactaggaaaacacttcgtcgtaaaaaacatagaatgcaacgtatcaaagtacttttagttaagtatggtttattatctacgactgagattgaaaatttatatgaaagtgctagtgaaattgatgtttggaacctacgtttagatgctctagaacgcaagttaaatcaaaaggaatttgcaagagtccttattcaccttgctaaaagaagaggatttaaatctaacatgaaagaaacaattctctcagaaaacggacaaatcttagaaagtatttcagaaaatcaaaagattatggagcaacaaaattatagaactgttggagaaatgattgtaaaagataacaagtttgaaaaccataaaagaaacaaagatggtacttatatcgggactgttactcgtcaacaacttcaagatgaaatacatatgattttcaatgcacaacgtttgtttataaatgaccttgcaacagaggaatttgaaagtagctacttagaaatttgggcatctcaacgtccctatgcttctaaagatcaaattgaaaaaatgattggttactgtaccttagaaccaaaagaaaaaagagtccctaaagcttcatggtcatttcaatattttgtagcgctacaaaccataaacaacctacgactgattagtaaagacaggatagaagaactctcttttgaagaaaagaaacaaattatgaatctagcacttgaaaaacctattgttaaatacattgatatccgaaaattattatccatttctaatgaacttcattttaacaatctattatattcagctgatacagtagatacaacggtggaaaataaaaaatgtatagaactcaaagaatatcactctattaataaggtatataaacaaatttatggaaagaacgccttaaatttattacctatagattacgatacaattgcatacggactaactatcttcaaagacgataaagatatcctagaatacttacaaaataaatatataaatacaaaaggaaaaactataagtaatttaacaaaaaagacatacgatgacacgtttattcaagcattattgactttgaacttcacaaaaatgggacatttatcatttaaagccttaaaaaatatcattccttttttagaagagggaatgtcatatgataaagcttgtgataaggcaggatataactttaagggaacatcatttacaaaaaaaacaaagtacttgcctgttattccacagaatacaaatcctgttgtacatcgtgctctttcacaaacaagaaaggtcataaatgcaattataaataaatacggttctccagtttcaattcatattgaaaccgcaagagagttatctaaaacattccaggaaagaaaagaaatagatagcatgtaccaggataactccaaaaagaatgaacacgccattaataagctaaaagaattaggtaacattaatccctcgggaataaatattgtcaaatttaagctttggaaggaacaagacggtagatgtatgtattccggagaatatattgaaccacatcgattatttgaagagggatataccgaagtagatcacatactaccctatagtcgtagtttagatgacagctataacaataaaacattagctttaggaatagaaaatcaacgaaaagggaacaaaactccttatgagtacatggggaacacctcaatttggtacaaatttgaaacgagggtacagtcgaataaaaaaattaacaaaaagaaacaacaaaaattgcttctacaatacttttcgcatgcaagagagcaagaatttatagagcgaaatctaaatgatacccgttacgccacaatatatatatcagcgtttattcaacaacacctcattttctctgaaagcttcagtaaaaaaagagttcatacagttagcggaattataacatctcatgtacgtagtagatggggatttaacaaggatcgtaaagaaagtcatatccatcacgcattagatgcagtgattgttgctgtcacatctgatcaaatgattcaaagagtaacaaattactataaactaaaagaattaaatagaaagcttcaagccaaagggatactgtttcccgaaccttgggaggggtttcgtttagaattagaagcaagaatttctccaaatacccagcaatatttaaagggaatttgttctaaaaattacgccgatatcaatctatccgaaatcaagcctatctttgtttcaagaatgcctaagcgatctattactggtgaattacatcaagagacaattcgaaaatttattggttataacgaaaaagggaaagtattaaccgcaataaaaacaaagttagaagatattccttttgatgccaatggtgattttcctatgtatggaaaagaaactgatttgtatacgtataatgccatcaaagaacgttatttaagtcataaaaaagataaacgtaaatcatttcaagaatccttatacaaacccacaaaaacaggagaaattgggccacttataaaatccattaaaataattgatacaagaaccattgtcaatcctgttaaccaaggtaaaggtgtcgtatataatagtaaaattgctcgtactgatgtattcaaaaaagatgataagtactatttaattcccatttatacaattgaccttatgaaaaatgttttacctcaaaaagcaattacagcaggaaaaggatatgaagattggataaccattgatcatagctttacttttttatttagcctttttcctaatgacctaataaaaattgtcccctcaaaaaataaagaaattaaagctaggtcaacttcatcaaaaaaagaaatattactaccatcactcacaggatattttaagaaggttcatagtggaacagcaggcattactgttgaatcccacgatggtaggtttatagcagatataggctcaaagcaattattattatttgaaaaacaccaggtagatgtactgggacattacacaaaaataaaggaggaaaaacgtattgggatgtcgacatgtaatgataacaaaaagagctcagctttcggttcgctataatcaactggttataaagcaagacgataaagtaagtattcctttagaggatattgcctctataattatagaagataattcggtaactatttcagcctatacacttagtaaattaagtgattataacatcgggttggttacatgtaatgaaaaacacttaccaaacggtatactaacatcttttcaaaagcatacaagacacgcaaaagttcttcaaacacagtataacttatccaagcctttcagaaaaagaatatggcaaaaaattattatgaagaagattatgaatcaggctaagtgccttgaaatcttagaaaaagagggatataaagaaattttatcaatatgtaaaaccatagaatcaggagatgtgaccaacagagaagcatatgcagcaaaactatatttcaaatatttatttagtgcacaatttacaagaagaacagaaaacatatataactattcgttaaattatggatattcaataatacgtggaatggttgcaagaacattagttagttatggtttcacaccctctcttggaattaaacatcacaatgagttaaataattttaatttggcagatgattttatggaagtatttcgacctatagttgatttattcgtagcttcccatatagattattctacagaatttagtaaagaagttcgaagaaacttatacaacatttcaaattatgaaatacaaatcgacagtaaatatcatagtattcaacaagcaattgaagtaatggtgaaaagttatgtatccgcttgtcgtacggaagattattgtttaataaaacttcctaatttaatcaaattaagaatgcattcatatgagtaatttcatgcggatattagtcttttttgacttacctgtcaagcaaaaaagtgaacgaaaagaatatatgcgattccgtaaattcctactcaatgatggatatgacatgctacaattttcaatttactgtagaatttgtaatgggaacgaaggtacaaaaaaatatttagagcgcttaaaatgcaatgttcccgaaaaaggttctattcgcacattaacgattacagataagcaatatgctaaaatggagtttttagtaggaaaaccaacaccaacagagaaaaaaataacttctgctcaacttacattattttaaaaagaaaaagttggaacaaaaaacaaatataaaacctcttttttaaacttaaaaaccttgtctatccctttaatgacaaggtttttttgacatctaccatatcatagcgatgtttcttatggaactatagctttattctatcgttcatcataacaatgtaaaccatatcatagcgatgtttcttatggaactatagcaacacgtaatagaatcataagtgcagttactaccatatcatagcgatgtttcttatggaactatagctcgtcgcccataaacaaacttattctttctgttatattatgataatttttcttatgaaacagtatcctattagccttatttcacgaaaacccaaatttcatagcagtattttcaaataaaattacatct

SEQ ID NO: 5 - DNA, 8221 bp, Lactobacillus fermentum
acgaccaaccgatcacgcctaagcaagtcgggtccgtctttgccctcggcacggtggcggtcctggtcggggcgatgaccaacctcggcgttaactccagcggccaaaccgttacggtggccgcccaacgctcccagctatcgacccagtacggggccaagccagttgacctggcgccgggcaagcaaatcagccaggtcgtcaagatcaacggggcagccagtgacgtctccgtgcagatccacaccaagtcacacgttacggtgaccctggtagaactaaaaactggtgacgaatacgtcttcaagcgccacgccgacgagtacgattaccaagggaacgtgccagccggtacctaccagttcgtgatcaagaaccaaaccgccgtggaccaagatgttgacatcgcccacgtcccgtactaccggatggcgccgtacccgatggacgaccagggaacggtccactgggacacgtcattgatctactggttccgtgacgttcgctccgccaattaaatagaattagaaaaccccagccgttcgggaaaccgagggctgggtttttgggtgggaagaggagaaaattttgaattaggagggatttttgggcgggcgacagaatatgtccgaggggtgggatactatggagttagtcggcaaacgcaaaaagaggtcgcaaaatagtcgctgatccttcgttcaaatttatcaaaataactactgaaagcgattgcgtttgctataatctatcttgactacgatattaaggagtggattacgtgaaagagtatcacattggcttggacattgggacaagctcaattggctgggcggtaacggatagccaatttaaactgatgcgtatcaaggggaagacggcaatcggggtgcggttgtttgaagaagggaagacggctgcagaacgtcgaaccttccggacaacgcggcggcggttgaagcggcgaaaatggcgcttgcactacttagataaaatttttgccccgcacttacaagaagtggatgaaaatttcttacgccgtctgaagcaatcaaatatccacccggaagatccagcgaagaatcaagccttcattggtaagctcttatttccggatctactgaagaagaatgaacgtggttacccaacactgattaagatgcgcgatgaattgccagttgagcaacgcgcccactacccagtaacgaacatctacaagttacgggaggccatgattaacgaagatcgccaattcgatctgcgggaagtttacctggccgttcaccacatcgtgaagtaccggggtcacttcttaaataacgctagcgttgataagttcaaagtggggagaatcgattttgacaaatcctttaacgttttgaacgaagcctacgaggagcttcaaaacggcgaaggttcattcacgattgagcctagcaaggttgaaaaaattggacaactgttgctagatacgaagatgcgtaagttggaccgccaaaaagcggttgccaaattgttagaggtgaaggtcgctgacaaagaggagaccaagcgcaacaagcaaattgcaacggcgatgagtaagttagttcttggctacaaggcggactttgcaacggtagcgatggcgaatggcaacgaatggaagatcgatttaagttctgaaaccagtgaggacgagattgaaaaattccgggaagaattgagtgatgctcaaaatgatatcttaacggaaatcactagcctgttctcgcagatcatgctgaatgaaatcgtgccaaatgggatgtcgatttctgaatcgatgatggatcgttattggatgcacgaacgtcaattagcggaagttaaggaatacttggcgacccaaccagctagcgcgcggaaagattttgaccaagtgtataacaaatacattgggcaagcgccaaaggaaaagggctttgaccttgaaaagggactcaagaagattttatccaaaaaggaaaattggaaagaaatcgatgagttactcaaggcaggtgatttcttaccaaagcaacggacatcagccaatggggtcatcccacaccagatgcaccaacaagaattggaccgaattattgaaaagcaagctaagtactacccgtggctagcaacggaaaacccagccactggtgaacgtgatcgtcaccaagcgaagtatgaacttgatcagctagtttccttccggattccttactatgttggaccgctagtaacgcctgaggttcaaaaggcgacatctggcgctaagtttgcttgggcaaagcggaaagaagatggggagattaccccttggaacctgtgggataagattgaccgtgctgaatcagctgaagcctttatcaagcggatgacggttaaggatacgtatctattaaacgaggatgtcctgcctgctaacagcttgctataccaaaagtacaacgtcttaaacgaactaaacaacgttcgagtgaatggacgccgcctatcagtcggaattaaacaagatatttacactgagctcttcaagaagaaaaagacggtgaaggcaggtgacgtggccagcctagtgatggcgaagacacgaggagttaacaagccaagtgttgaaggtttatccgatccgaagaagttcaattcaaatttggcaacctaccttgatctaaagtcaattgtgggtgacaaggttgatgataaccgttatcaaatggatctcgaaaacattatcgagtggcgttccgtctttgaagatggggaaatttttgcggacaagttaactgaagtggaatggctgacggatgagcaacgttctgcccttgttaagaaacggtataagggctggggacgtttatccaagaagctactgacgggaatcgttgacgagaacggccaacggatcattgatctgatgtggaatactgatcaaaacttcatgcagattgtcaaccagcctgtctttaaagaacagattgaccaactgaaccaaaaggccatcaccaatgatgggatgactttgcgggagcgggtcgagagcgttctggatgacgcctatacttcaccgcagaacaagaaggccatctggcaagttgttcgggtggtggaagatattgttaaagcggtcgggaatgcaccaaagtcgatttcaattgaatttgcccgtaatgaaggcaacaagggagaaataacccggagccggcgtactcaattgcagaaattatttgaagatcaggcccatgaattagttaaggatacgagcttgactgaggaattggagaaggcaccggatctttccgatcgttattacttctacttcacccaaggtggtaaggatatgtacaccggtgatccaatcaacttcgatgaaatttctaccaagtatgatattgaccacattttgccacaatccttcgtgaaggatgattccttagataatcgggtgttagtaagtcgggcggagaataataagaagtctgaccgggtgccagctaagctttacgcagccaagatgaaaccatactggaaccaacttttgaagcagggattgatcacgcaacggaagtttgaaaacctgacgatggacgttgatcaaaatattaagtatcggtcacttggattcgtgaagcgccaattagttgaaacacgccaagttatcaagttgacggctaacatcttgggtagtatgtaccaagaagccgggacggacatcattgagactcgggctggtttaactaagcaattacgcgaggaattcgatttaccaaaggttcgtgaagtaaacgactatcaccacgcagttgatgcttacctgacaacgtttgctgggcaatatttgaaccgccgttatccgaaattacgctccttcttcgtatacggtgagtacatgaagttcaagcatgggtcagatctgaagctacgtaactttaacttcttccatgaattgatggaaggcgacaagagccaaggtaaggttgtcgatcaacaaactggtgagctgattacgacaagggatgaagtagccaagagctttgatcgattattgaacatgaagtatatgctggtatcgaaggaagttcacgaccggagtgaccaactgtatggagcaacgattgtaacagcaaaggaatctggtaagctcacttcaccaattgagatcaagaaaaatcgacctgttgatttgtatggtgcttatacgaatggaacgtcagctttcatgacgatcattaagtttactggaaacaaacctaagtataaggtgattggggttccaacaacatcggcggtcggtttaaaacgagttgggaaaccaggcagtgaatcatataaccaagaattacatcgaatcattaaatctaatccgaaggtaaagaaagattttgagattgtagttccacatgtttcgtatagtcagttgatagttgatggtgactgcaaatttaccctagctagtgatacttatcagcatccggcaactcagctagttctttctaaagaatcgatggaaataattgcagatgattttaaatttgtgaaagaaaatccggcaactgcggatgaacaacttgttagggtttttgatgaaattgttaatcaaatgaaccattactttactatctttgaccaacgtagtaatcgtcaaaaggtaacgaaggctcgagataagtttgtatcgttaccaacggaatcagagtatgagggtgctaagaaaacgcaagtagggaagacagaagtcattacgaacttactgatgggtctacatgccaatgctgcacaaggtgatttgaaagtattaggattatcaacctttgggtttttccagagttcaggtggactgaatttaagtgaagatgcaatgatcgtataccagtcaccaaccggtttgtttgaacgtcgcatttgtttgaaagacatttaagagtaaagtaaaaaggagccgattaaatcgactcctttttattatatgtatggccagaataacatggctcaaaagtaataactcgtggaaaaccactcgtttgatcttgactatgagtgttagatcagtagtctcgaatgtcgggagctacccgacaagttatattatatggaattcggttgaatttgacaaggaggaattttaaaaatgggatggcgttcaataatcattggtcaacatgcaaagattacccactctgctcatatgatggttgtgcagactaaagatgggattaatgaaattccgatggatgacattgcaaaagtactagttgaaacaactcaggcgatgatctcttcagatttcatgagtgcatgcctacaacggaacattaaagtaatctttgtcgatcgaaagtaccaaccgattggggagacggttggttatcagccagtagcgagggattatgaattgttggaacgccaattcttatggcccttggagcgaagggaacaactttggactaggattgcccacgccaaaatcgagagccaaataaaggtggcccggcttaatggatgcccggttcaagaactagaaagtgagttagaagccattgaagtaaatgatatttctaaccgtgaggctgtggttgctcgaaagtatttcccattgctgttcggaaaagattttagccgccgacaggagaatcaatacaacgccgctctggattatggatatgcggttttattagcggagacaaaccaatcgattacggaaaatggctatctgatggaactaggaatccatcatcaaaatcgagaaaacaggtttaatttgggttcagatttgatggaaccatttcgaccagtgatcgactactgggttacaggacagaaatttgcggaattcaatcgtcaagtccgagttggcttagtagatgcaatgcatacggtgatcaagtataacgggattgaaatgctgactcaaaatgcagtgaggcagtatgtgcgggaatgtcttgattacttgagtggtgagcgggatgaaattgaagtaaaggtggagtttaaagatgaggtaccgaatcatgcgcttgatggtcatgtttgatttgcccacggacactagtcagcaacgaaagcagtatcgtcagttccgcaagaagctattaaatgaaggatttattatgatccagtactctgtttacgttcgtgtatgtacgacaaggagtgcggctgagtttttggagagaaggcttaagaattatttaccagaccaaggagtcatccaatcgttaatgttaacggaaaagcaatacagtgacatgcatttcttgcttggtgatgaggttaaagaagttagaaattcatcaaagaggacgattgtactatgaaattgcaataccatggccatcaaccagttgaactgatgcctggaaaagtagtgattttgcaaatagagaacccaagcgtcaacaccgaattaattcaggggttgcagggatataatgattgcttaaggatgattgacgatgagtaccaagagcttaatttgagtaaggtaatgaagtgggaaggagaccttgttcttaatccaaccaagcttgatagctaccaaacagcacttgataagatgattgtcaaaaatcttagcattcagaaacgagatcggatgaatgaccttgctcgtgaggtgttctcagagatgcaagattctttgttcgaattcgacttaccgttggaggtgcggtatgacgagagcctcttgagattatacaaatatgcgaaaattaaatatttgacgcaagtaataaggcaaccttatggtataattgaaaccgatctaaaattacatctcgaattaaaagactgtcaggttcttgggtattgtaatgtcgctaattacttattgcctgagcagatacaggaattcgctactcttgttgagaaaaccgaattggcagttttattagtggaattctcagaaaagagagaaactctacaacaactcaaacaggatatttaccggattgatcgggacttcgtggactggcacgaatagatcgttagtttttgatgagaaaataacggtcttggatgagtgtcagatcagtagttccgagtacatcgattacaggtcaacagagttccgatgagtcttggatgagtgtcagatcagtagttccgagtacagctaacgtccaccgagtgggcactgttttgtcttggatgagtgtcagatcagtagttccgagtaccggtactgcccagctgtcagcgtaggttgggtcttggatgagtgtcagatcagtagttccgagtaccgattgtaccgaaatacgacctttgcatttgtcttggatgagtgtcagatcagtagttccgagtactgatcttttaaaaatttgatggtttctttcgtcttggatgagtgtcagatcagtagttccgagtacgtgaccgttaaggatcagccgtccacgcttgtcttggatgagtgtcagatcagtagttccgagtacttgctaccagtcttagccacgccggtggaggtcttggatgagtgtcagatcagtagttccgagtacgtgacggttggcccagagggattgacaacggtcttggatgagtgtcagatcagtagttccgagtacaggtttttagtggaaaactgtacttatcgcgtcttggatgagtgtcagatcagtagttccgagtactgtttgcttttaactggccaacttggtcgcgtcttggatgagtgtcagatcagtagttccgagtacactaagctagcgattttccacagtgcattggtcttggatgagtgtcagatcagtagttccgagtacatttcaaagagtctcagcgcctctgatacggtcttggatgagtgtcagatcagtagttccgagtaccgattgatagcgtgagttgtcggtcccgtagtcttggatgagtgtcagatcagtagttccgagtaccacaattggttaatgcaactcacacgatccgtcttggatgagtgtcagatcagtagtcttataattatagactaagggcgttgctgtttttagcaatgccttttttagaagtgatgggggaaagataaatattcccacgttggtaatctgacgggaactttagcgggcgatgtgctaggatagggccaaaatgattggaagtgtttaccatgcaaattgatcccgaacggattcgccccgaactgcaccggatcggcaaggtggggtacgcgatcaacctgatggccagcccgcacgcctgcaacgaatgggacgaa

SEQ ID NO: 6 - DNA, 8221 bp, Enterococcus faecalis
taaaaataaaccagtaacgctaataactcctataaaataaaaaaactttttcaaaatattccctccaattaaatttatgtattaattttatcattagtgatagtaaacataaagaaataaaaaattcaaagtatcaataaacattgctgatactctgaattatagctctgcccagacttttttagttgtggaaaagttgtgattttttatttttttattccataaaccttatgatttgaagggattaaaaggtttgctatttatcgtttagcgaagtaaagtaaaaaagctgttttcgattttcgaaaacagcttttttttgcaatttttgccttttaaaaacccaaaatcagaaccgtcaatttactgaaaatttcttgcaaatcaaaggatcccacgatacgataaataggagaaaaggcaatgagtgaaacacttattgttaactatttaatcaaaggacgtgtgaagatgaacgtagaagaattagttcaaaaagcaaaagatttaattggagaaggcaacgtggaacatgcgcaacaattcattgaagaacataaagatgaattaggcgaacactatcataaaattacagcgatgttagctgatacaacgaccgatggtttgtttgataaaattaaaggattgtttcaatagtcgtaattaaaaaggcaaaacacagttaaccacgcactgtgttttgccttttttgccatgtaaagtttgacaacatcaacaaatagtaaaagatattaccatacaataaatatagattcgttattttaagaaaagtaaaggaattaaggtaagagattcttaaatagataatgttatttttgttatgtatataattctattagtttacaaaaactataaataaccctttttttaagaaaataagaatggtaaactttaagtagcggtattcagtttgattaatttggaagcgattactttctggctgcaaacaaaaaaaagcgccgaaacagcgccactttacagttgattacggttaaaaccttattttaacttgctatgttgtttagaatagtcccaaaagaacttaactaaattatagcatagaataaaaatcattcaagtagtaattaaaaaaaaggagtggaaataaaatgaagaaagactacgttatcggtttggatatagggactaattctgtcggttgggcagttatgacagaagactatcagttggtgaagaaaaaaatgcctatttatggaaacactgaaaaaaagaaaatcaagaaaaatttttggggtgtgcgtttatttgaagaagggcatacagccgaagatcgccgattaaaaagaacagcacgacgaagaattagtcgtcgacggaatcgtttacgctacttacaagctttttttgaagaagcgatgacagctttggatgaaaacttttttgctcgtttacaagagagttttttagtgcctgaagataagaagtggcacagacatccgatttttgctaagttggaagatgaagtagcttaccatgaaacgtatccgacaatctaccatttacgcaaaaaattagcagattcatctgagcaagcagatttacgactaatttatttggcgttggcatatattgtcaaatatcgtggacattttttaattgaagggaaattaagtacagaaaatatttctgttaaagaaaaatttcaacaatttatgatcatttataaccagacctttgtgaatggagagggtcgcttagttagtgcgccattacctgaatctgtcttgattgaggaagagttgactgaaaaagcttctcggactaaaaaatctgaaaaagtcttacaacaatttcctcaagaaaaagctaatggcttatttggtcagttcttaaagctaatggtagggaataaggctgactttaaaaaagtttttggtttggaagaagaagccaaaataacctacgctagtgaaagctatgaagaagatttagaaggcattttagcaaaggttggggatgaatatagtgacgtgtttttagctgctaaaaatgtgtacgatgcagttgaattatcaacgattttagcagattcggataaaaaaagttacgcgaaattatcttctagcatgattgtccgttttacagaacatcaagaagatttaaaaaaattcaaacgatttattcgtgaaaattgtccagacgaatatgataatctctttaaaaatgaacagaaagacggctatgcaggctacattgcacacgcaggtaaggtttcacagcttaaattttaccagtatgttaagaaaatcattcaagatattgctggagcagaatattttttagaaaaaattgctcaagaaaactttttaagaaagcaacggacctttgataatggggtgattcctcatcaaattcatttggctgagttacaagcaatcattcatcgtcaagcggcctattatccatttttaaaagaaaatcaagaaaaaattgaacaactggttacatttcgaattccttattatgtcggaccattatcaaaaggagatgcaagtaccttcgcttggctaaaacgtcaaagtgaggaaccaattcgaccttggaaccttcaagaaaccgttgatttggaccaatcagcgacagcctttattgaacgaatgaccaattttgatacgtatttaccttctgaaaaagttttaccgaaacatagtttgttatatgaaaagtttatggtatttaatgaattgaccaagatttcttatacggatgatcgaggcatcaaagccaatttttcaggtaaggaaaaagaaaaaatctttgattatctgtttaagacgcgtcgcaaagttaagaaaaaggatatcattcaattctatcgaaacgaatataatacggagattgtcacgcttagtggacttgaagaagaccaatttaatgctagttttagcacgtatcaggatttactgaaatgtggtttgacacgagcagaattagaccacccagataatgccgaaaaattggaagatatcataaaaattttaactatttttgaagatcggcaacgaattcggacgcaactttctacattcaaagggcagttctcagcagaagtactaaaaaaattagaacgcaagcactacactggctggggaagattgtcgaagaaattaatcaatggtatctacgataaagaatcgggtaaaacaattttggactatttagttaaagatgatggggtctcaaaacactataatcgcaattttatgcaactgattaatgattcacaattatcttttaaaaatgctattcaaaaagcacagtccagtgaacatgaagaaacattaagtgaaactgtcaatgaattagctggtagcccagcaataaaaaaaggaatttatcaaagtttaaaaattgtcgatgaactagtcgcgattatgggttatgcgcctaagcggattgttgtcgaaatggcacgtgaaaatcaaacgactagcactggcaagagaagatccatccaacgcttgaaaatagttgaaaaagcaatggccgaaatcggcagcaatttattaaaagaacaaccaacgactaatgaacagttacgagatacccgtcttttcctttactatatgcaaaatggtaaagatatgtacacgggagatgaattatcgcttcatcgtttatctcactatgatattgatcatattatcccacaaagttttatgaaagacgattcattggataacctagttttagtgggctctactgaaaatcgagggaaatccgatgatgtacctagcaaggaagttgttaaggatatgaaagcttattgggagaaattatatgctgctggcttaattagtcaacggaaattccaacgtctgaccaaaggggagcaaggtggcttgactctcgaagacaaagcgcattttatccaacgacaattagtagaaactcgtcaaattaccaaaaatgttgcagggatcttagatcaacgctacaatgccaagtcaaaagagaaaaaagtccaaatcatcaccttgaaagctagtttaacgagccaatttcgttcgatttttggcttgtataaagttcgtgaagtgaatgattatcaccatggacaagatgcttatttaaactgtgtggtcgcaaccacgttattaaaagtttatcctaatttagcaccagaatttgtttacggagaatatcctaagttccagacctttaaagaaaataaagccacggcgaaggctataatttatacaaatttgctgcgctttttcacggaagatgaaccacggttcacgaaggatggcgaaattctttggagtaacagttatttaaaaactatcaaaaaagaattaaattaccatcaaatgaatattgtcaaaaaagtagaagtgcaaaaaggcggtttttcaaaagagtcgattaaacccaaaggaccatcgaataaattgattcctgtcaaaaatggtttggatccccaaaaatatggcggttttgatagtcctatagttgcatatacagtgctattcacgcatgaaaaaggtaaaaaacctcttattaaacaggagatactgggcattacgattatggaaaaaacaaggtttgaacaaaatcctattctttttttagaggagaaaggcttcctacggcctcgtgtattaatgaaattgcctaagtatacactgtatgaatttccagagggacgccggcgcttattagccagcgctaaagaagcgcaaaaagggaaccagatggttttacctgaacatttacttacattactgtaccatgcgaaacaatgtttgttaccaaatcaatcagaaagtttggcttatgtagaacaacatcaaccagaatttcaagagattttagagagagtggttgactttgctgaagtgcatacattagccaagtcaaaagtccagcaaattgtgaaactttttgaagcaaatcaaacagcagatgtgaaagagattgcggcatcctttatccaacttatgcagtttaatgcgatgggcgcaccaagtacgtttaaatttttccaaaaagacattgagcgagcacgctacacgtcaatcaaagaaatttttgatgccactatcatttaccaatcgactacgggactgtatgaaacacgcagaaaggttgtcgactagatgggctggcgaacggtagtggttaacaagcattcaaaattatcctataaaaacaatcatcttgtttttaaagcaattgatcaccaagaattaattcatttgtctgagattgatgttttgttgttggaaacaacggacatttcgttaaccacgatgctattaaaacgattaattgatgaaaaaatattagtgttattttgcgatgataagcgtttgccaattggtaaaattttgcccttttatggacggcatgatagtagcttgcaattgacacgccagttggcttggacggaagaacgaaaaggtcaagtttggacagcgatcattgcacaaaaaatcaccaatcagagtttacacttagcgcaacgagactatagccaaaaggctgctgctttgttagctatgcgcgctgaattacgtctgtttgatccagccaatcgagaaggtcatgcagctcgaagttactttaatactctcttcggcaatgattttacacgtgaacaagaaaatgacattaatgctggtttaaactatggttatacgttgttattaagtatttttgctcgagagttagtccagacaggttgttttacacaactaggactaaaacatgccaaccaatttaatgactttaacttagcaagtgatcttatggagccttttcgtccattggtagatcaaatcatttatgagaatagaaaagaagcatttccgataatgaaacgtaagttatttgctttgtttatgaatacgtatatgtacaagaaaaaacaaatgtttttaaccaatattgctaccgattatacaaaacatgtagtaaaagttctgaatcaagaggaggaaggagttccagagtttgggatatgagttatcgatatatgcgtctattattaatgtttgatatgccaacggacacagccagtgaccggaaagcgtatcggaagttccggaaatttttgattaatgaaggatttattatgcatcaattttcggtttacagcaaaattttgttgaatgatactgctaataaagcaatgttggctcgcttaaagcagaataatccgcaaagaggactaattacactattaaatgtaacagaaaaacaattttctcgaatgatttatttgcatggagaacaagacaatcgagttgctaattcagatgaacggattgtctttttaggagaagaatagatgagagttaatttttctttattggaagaacccattgaaattgaaaaagccacctttttaacgattaaagacgttcaaacctttgcccatctagtgaagttaatttatcaatatgatggggaaaatgagttaaaactatttgatgcgcaacaaaaagggctgaaaccaacggaattatttgttgttacggatattttaggctatgacgttaattcggctgccacgctgaaattaatctatggggatttagaagcacaattaaatgataaaccagaagtcaaatcaatgattgagaagttaactggaacaattagtcaattaattggctatgaattgttggaacatgaaatggatttggaagaagatggcatcactgtgcaggaacttttcaaagctcttggaatcaaaatcgaaacaacgagtgatacgatttttgaaaaagttatggaaattacacaagtacatcgttatttatcaaagaaaaaattattgatttttattaatgcgtgtacgtatttgacagaggatgaagtgcaacaagtggtagaatatatctctttaaataatgtggatgtcctgtttttagaacaaagggtggtccagaacagattccaatatattttggacgaaaacttttatttgagttatgaaaaagcttaaattgttactgattagtggttcattctaaactgaaatctagctatggataagtgatgcgagtacggaactttggaaaaaaataattctccgaggttttagagtcatgttgtttagaatggtaccaaaacaagtgcaactagctagaattgaatcaaactgttttagagtcatgttgtttagaatggtaccaaaacccacctgttgcatatatagcattcacaagtgttttagagtcatgttgtttagaatggtaccaaaacatttaagattagatatgaacaacttacgttgttttagagtcatgttgtttagaatggtaccaaaactcaatccattcagcaactatattgtgtttagttttagagtcatgttgtttagaatggtaccaaaacatgtactcattctaatgtataagaagtgcagttttagagtcatgttgtttagaatggtaccaaaacgtgaacttttttctgttggtgcgttgtttcgttttagagtcatgttgtttagaatggtaccaaaactaaacagtctaccatgtaactagtgaatgcgttttagagtcatgttgtttagaatggtaccaaaacttatagaagtacagtcaccatcagcgacctgttttagagtcatgttgtttagaatggtaccaaaacagggctgcaggagttaatgttacaatctcagttttagagtcatgttgtttagaatggtaccaaaacatcatctcatcgactaaatatgctttgtatgttttagagtcatgttgtttagaatggtaccaaaacccactttattaattgcttgtcaacacgtctgttttagagtcatgttgtttagaatggtaccaaaacgtatctacgtgcataatcatatcgactcatgttttagagtcatgttgtttagaatggtaccaaaaccaatgtaaatgctcattatgatttacatatgttttagagtcatgttgtttagttttcgcagatacgatttgattgatgtaaaaatatcgttaatatgtataaatatggttattatataaaaaatataagtaataaattgaagctttgctaaagcaagtgatgcgattacgaaattatttaattttagagtcacgttatttattactttacgaatagagaatacgattatctataaatcaagaattaatccccaatttattgaaaatgacactccctgttttattaatatttcatgcttttgttg

SEQ ID NO: 7 - DNA, 8221 bp, Bacillus cereus
  misc_feature (7114)..(7123): n is a, c, g, or t
  misc_feature (7176)..(7289): n is a, c, g, or t
agtttacgaagaccatacaggcgaaaaaggccaagaacaaatcattggtggcggtacttatggccgcttattaaaacgtggtgttgcctatggcgcaatgttccctggctacacagacacaatgcaccaagccaacgaatttatggaattagatgacttattccgagcagctgctatttatgcagatgcgatttatcgtttagcgaagtaaagtaaaaaagctgttttcgattttcgaaaacagtttttttttgcaatttttgccttttaaaaacccaaaatcagaaccgtcaatttactgaaaatttcttgcaaatcaaaggatcccacgatacgataaataggagaaaacgcaatgagtgaaacacttattgttaactatttaatcaaaggacgtgtgaagatgaacgtagaagaattagttcaaaaagcaaaagatttaattggagaaggcaacgtggaacatgcgcaacaattcattgaagaacataaagatgaattaggcgaacactatcataaaattacagcgctgttagctgatacaacgaccgatggtttgtttgataaaattaaaggattatttcaatagtcgtaattaaaaaggcaaaacacagttaaccacgcactgtgttttgccttttttgccatgtaaagtttgacaacatcaacaaatagtaaaagatattaccatacaataaatatagattcgttattttaaggaaagtaaagaaattaaggtaagagattcttaaatagataatgttatttttgttacatatataactatattagttaaaaaaactataaataaccctttttttaagaaaataagaatggtaaactttaagtagtgttattcagtttgattgatttggaagcgattacttttaaatttcaaacaaaaaaagcgccgaaacagcgccactttacagttgattacggttaaaaccttattttaacttgctatgttgtttagaatagtcccaaaagaacttaactaaattatagcatagaataaaaatcattcaagtagtaatttaaaaaaaggagtggaaataaaatgaagaaagattacgttattggtctggatataggaactaattctgtcggctgggcagttatgacagaagactatcagttggtgaagaaaaaaatgcctatttatggaaacactgaaaaaaagaaaattaagaaaaatttttggggtgtgcgtttatttgaagaagggcatacagccgaagatcgccgattaaaaagaacagcacgacgaagaattagtcgtcgacggaatcgtttacgctacttacaagctttttttgaagaagcgatgacagatttggatgaaaacttttttgctcgtttacatgagagttttttagtgcctgaagataagaagtggcacagacatccgatttttgctaagttggaagatgaagtagcttaccatgaaacgtatccgacaatctaccatttacgcaaaaaattagcagattcatctgagcaagcagatttacgactaatttatttggcgttggcccatattgtcaaatatcgtggacattttttaattgaaggaaaactaagtacagaaaatacttctgttaaagaacaatttcaacaatttatggtcatttataaccaaacctttgtgaatggggagagtcgcttagttagtgcgcctttacctgaatctgtcttgattgaggaagagttaactgaaaaagcttctcggactaaaaaatctgaaaaagtcttacaacaatttcctcaagaaaaagctaatggcttatttggtcagtttttaaagctaatggtagggaataaagctgactttaaaaaagtttttgctttggaagaagaagccaaaataacctacgctagtgaaagttatgaagaagatttagaaggcattttagcaaagattggggatgaatatagtgacgtgtttttagctgctaaaaatgtgtacgatgcagttgaattatcaacgattttagcagattcggataaaaaaagtcacgcgaaattatcttctagcatgattgtccgttttacagaacatcaagaagatttaaaaaaattcaaacggtttattcgtgaaaattgtccagacgaatatgataatctctttaaaaatgaacagaaagacggctatgcaggttacattgcacacgcaggtaaggtttcacagcttaaattttaccagtatgttaagaaaatcattcaagatattgctggagcagaatattttttagaaaaaattgctcaagaaaactttttaagaaagcaacggacctttgataatggggtgattcctcatcaaattcatttggctgagttacaagcaatcattcatcgtcaagcggcctattatccatttttaaaagaaaatcaagaaaaaattgaacaactggttacatttcgaattccttattatgtcggaccattatcaaaaggagatgcaagtaccttcgcttggttaaaacgtcaaaatgagaaaccaattcgaccttggaaccttcaagaaaccgttgatttggaccaatcagcgacagcctttattgaacgaatgaccaattttgatacgtatttaccttctgaaaaagttttaccgaaacatagtttgttatatgaaaagtttatggtatttaatgaattgaccaagatttcttatacggatgatcgaggaatcaaagccaatttttcaggtaaggaaaaagaaaaaatctttgattatctgtttaagacgcgtcgaaaagttaagaaaaaggatataattcaattctatcgaaacgaatataatacggagattgtcacgcttagtggacttgaagaagaccaatttaatgctagttttagcacgtatcaggatttactgaaatgtggtttgacaagagcagaattagaccacccagataatgccgaaaaattggaagatatcataaaaattttaactatttttgaagatcggcaacgaattcggacgcaactttccacattcaaagggcagttctcagcagaagtactaaaaaaattagaacgcaagcactacactggctggggaagattgtcgaagaaattaatcaatggtatctacgataaagaatcgggtaaaacaattttggactatttagttaaagatgatggggtctcaaaacactataatcgcaattttatgcaactgattaatgattcacaattatcttttaaaaatgcgattcaaaaagcacagtccagtgaacatgaagaaacattaagtgaaactgtcaatgaattagctggtagcccagcaataaaaaaaggaatttatcaaagtttaaaaattgtcgatgaactagtcgcgattatgggttatgcgcctaagcggattgttgtcgaaatggcacgtgaaaatcaaacgactagcactggcaagagaagatccatccaacgcttgaaaatagttgaaaaagcaatggccgaaatcggcagcaatttattaaaagaacaaccaacgactaatgaacagttacgagatacccgtcttttcctttactatatgcaaaatggtaaagatatgtacacgggagatgaattatcgcttcatcgtttatctcactatgatattgatcatattatcccacaaagttttatgaaagacgattcattggataacctagttttagtgggctctactgaaaatcgagggaaatccgatgatgtacctagcaaggaagttgttaaggatatgaaagcttattgggagaaattatatgctgctggcttaattagtcaacggaaattccaacgtctgaccaagggggagcaaggtggcttgactctcgaagacaaagcgcattttatccaacggcaattagtagaaactcgtcaaattaccaaaaatgttgcagggatcttagatcaacgctacaatgccaagtcaaaagagaaaaaagtccaaatcatcaccttgaaagctagtttaacgagccaatttcgttcgatttttggcttgtataaagtccgtgaagtgaatgattatcaccatggacaagatgcttatttaaactgtgtggtcgcaaccacgttattaaaagtttgtcctaatttagcaccagaatttgtttacggagaatatcctaagttccagacctttaaagaaaataaagccacggcgaaggctataatttatacaaatttgctgcgctttttcacggaagatgaaccacggttcacgaaggatggcgaaattctttggagtaacagttatttaaaaactatcaaaaaagaattaaattaccatcaaatgaatattgtcaaaaaagtagaagtgcaaaaaggcggtttttcaaaagagtcgattaaacccaaaggaccatcgaataaattgattcctgtcaaaaatggtttggatccccaaaaatatggcggttttgatagtcctgtagttgcttatacagtgctattcacgcatgaaaaaggtaaaaaacctcttattaaacaggagatactgggcattacgattatggaaaaaacaaggtttgaacaaaatcctattctttttttagaggagaaaggcttcctgcggcctcgtgtattaatgaaattgcctaagtatacactgtatgaatttccagaggggcgccggcgcttattagctagtgctaaagaagcgcaaaaagggaaccagatggttttacccgaacatttacttacattactgtaccatgcgaaacaatgtttgttaccaaatcaatcagaaagtttggcttatgtagaacaacatcaaccagaatttcaagagattttagagagagtggttgactttgctgaagtgcatacattagccaagtcaaaagtccagcaaattgtgaaactttttgaagcaaatcaaacagcagatgtgaaagagattgcggcatcctttatccaacttatgcagtttaatgcgatgggcgcaccaagtacgtttaaatttttccaaaaagatattgagcgagcacgctacacgtcaatcaaagaaatttttgatgccactatcatttaccaatcgactacgggcctgtatgaaacacgcagaaaggttgtcgactagatgggctggcgaacggtagtggttaataagcattcaaaattatcctataaaaacaatcatcttgtttttaaagccattgatcaccaagaattaattcatttgtctgagattgatgttttgttgttggaaacaacggacatttcgttaaccacgatgctattaaaacgattaattgatgaaaaaatattagtgttattttgcgatgataagcgtttgccaattggtaaaattttgcccttttatggacggcatgatagtagcttgcaattgacacgtcagttggcttggacggaagaacgaaaaggtcaagtttggacagcgatcattgcacaaaaaatcaccaatcagagtttacacttagcgcaacgagactatggccaaaaggctgctgctttgttagctatgcgcgctgaattacgtctgtttgatccagccaatcgagaaggtcatgcagctcgaagttattttaatactctcttcggcaatgattttacacgtgaacaagaaaatgacattaatgctggtttaaactatggttatacgttgttattaagtatttttgctcgagagttagtccagacaggttgttttacacaactaggactaaaacatgccaaccaatttaatgactttaacttagcaagtgatcttatggagccttttcgtccattggtagatcaaatcatttatgagaatagaaaagaagcctttccgataatgaaacgtaagttatttgctttgtttatgaatacgtatatgtacaagaaaaaacaaatgtttttaaccaatattgctaccgattatacaaaacatgtagtaaaagttctgaatcaagaggaggaaggagttccagagtttgggatatgagttatcgatatatgcgtctattattaatgtttgatatgccaacggacacagccagtgaccggaaagcgtatcggaagttccggaaatttttgattaatgaaggatttattatgcatcaattttcggtttacagcaaaattttgttgaatgatactgctaataaagcaatgttggctcgcttaaagcagaataatccgcaaagaggactaattacactattaaatgtaacagaaaaacaattttctcgaatgatttatttacatggagaacaagacaatcgagttgctaattcagatgaacggattgtctttttaggagaagaatagatgagagttaatttttctttattggaagaacccattgaaattgaaaaagccacctttttaacgattaaagacgttcaaacctttgcccatctagtgaagttaatttatcaatatgatggggaaaatgagttaaaactatttgatacgcaacaaaaagggctgaaaccaacggaattatttgttgttacggatattttaggctatgatgttaattcggctgccacgctgaaattaatctatggggatttagaagcacaattaaatgataaaccagaagtcaaatcaatgattgagaagttaactggaacaattagtcaattaattggctatgaattgttggaacatgaaatggatttggaagaagatggcatcactgtgcaggaacttttcaaagctcttggaatcaaaatcgaaacaacgagtgatacgatttttgaaaaagttatggaaattacacaagtacatcgttatttatcaaagaaaaaattattgatttttattaatgcgtgtacgtatttgacagaggatgaagtgcaacaagtggtagaatatatctctttaaataatgtggatgtcctgtttttagaacaaagggtggtccagaacagattccaatatattttggacgaaaacttttatttgagttatgaaaaagcttaaattgttattgattagtggttcgttctaaactgaaatctagctatggataagtgatgcgagtacggaactttggagaaaaaataattctccgaggttttagagtcatgttgtttagaatggtaccaaaactgccctctgctttattatgtgtgtgagagggttttagagtcatgttgtttagaatggnnnnnnnnnntgtttgtttgttggaatatagtcttggtggttttagagtcatgttgtttagannnnnnnnnnnnnnnnnnnnnnnnnnnnnnnnnnnnnnnnnnnnnnnnnnnnnnnnnnnnnnnnnnnnnnnnnnnnnnnnnnnnnnnnnnnnnnnnnnnnnnnnnnnnnnnnnntaacaaagaaaaagcatgatttattgattgttttagagtcatgttgtttagaatggtaccaaaacaaacaaaatatataacgaagattgcttagagttttagagtcatgttgtttagaatggtaccaaaacggatcccacacctcaaccccaaatggtgttgttttagagtcatgttgtttagaatggtaccaaaacttgagactgcgtataattgtgagtatggtggttttagagtcatgttgtttagaatggtaccaaaactgaaacttccaaggcatccctttactagttgttttagagtcatgttgtttagaatggtaccaaaacttgtttcacctcgtttctgttattaagtgtgttttagagtcatgttgtttagaatggtaccaaaacttgagactgcgtataattgtgagtatggtggttttagagtcatgttgtttagaatggtaccaaaacagaagttccttacaacgtatcaacttaccggttttagagtcatgttgtttagaatggtaccaaaacactctatatcgtgcattcttttccaatgttgttttagagtcatgttgtttagttttcgcagatacgatttgattgatgtaaaaatatcgttaatatgtataaatgtgattgttatataaaaaatataagtaataaattgaagctttgctagagcaagtgatgcgattacgaaattatttaattttagagtcacgttatttattactttgcgaatagagaatacgattatctataaatcaagaactaatccccaatttattgaaaatgacactccctgttttattaatatttcatgcttttgttgtactatttgatgatacaaaaaagtaaaactgaggacccaattaaagtcaagttaaccacattgaaagataaacctttcaatgtggttaaagatgcttaatg

SEQ ID NO: 8 - DNA, 8091 bp, Enterococcus faecalis
ggcgcaatgttccctggctacacagacacaatgcaccaagccaacgaatttatggaattagatgacttattccgagcagctgctatttatgcagatgcgatttatcgtttagcgaagtaaagtaaaaaagctgttttcgattttcgaaaacagctttttttttgcaatttttgccttttaaaaacccaaaatcagaactgtcaatttactgaaaatttcttgcaaatcaagggatcccacgatacgataaataggagaaaacgcaatgagtgaaacacttattgttaactatttaatcaaaggacgtgtgaagatgaacgtagaagaattagttcaaaaagcaaaagatttaattggagaaggcaacgtggaacatgcgcaacaattcattgaagaacataaagatgaattaggcgaacactatcataaaattacagcgctgttagctgatacaacgaccgatggtttgtttgataaaattaaaggattgtttcaataatcgtaattaaaaaggcaaaacacagttaaccacgcactgtgttttgccttttttgccatgtaaagtttgacaacatcaacaaatagtaaaagatattaccatacaataaatatagattcgttattttaaggaaagtaaagaaattaaggtaagagattcttaaatagataatgttatttttgttatgtatataattctattagtttacaaaaactataaatacccctttttttaagaaaataagaatggtaaactttaagtagcggtattcagtttgatcaatttggaagcgattactttctgattgtaaacaaaaaaagcgccgaaacagcgccactttacagttgattacggttgaaaccttattttaacttgctatgttgtttagaatagtcccaaaagaacttaactaaattatagcatagaataaaaatcattcaagtagtaatttaaaaaaaggagtggaaataaaatgaagaaagactacgttatcggtttggatatagggactaattctgtcggttgggcagttatgacagaagactatcagttggtgaagaaaaaaatgcctatttatggaaacactgaaaaaaagaaaatcaagaaaaatttttggggtgtgcgtttatttgaagaagggcatacagctgaagatcgccgattaaaaagaacagcacgacgaagaattagtcgtcgacggaatcgtttacgctacttacaagctttttttgaagaagcgatgacagatttggatgaaaacttttttgctcgtttacaagagagttttttagtgcctgaagataagaagtggcacagacatccgatttttgctaagttggaagatgaagtagcttaccatgaaacgtatccgacaatctaccatttacgcaaaaaattagcagattcatctgagcaagcagatttacgactaatttatttggcgttggcccatattgtcaaatatcgtggacattttttaattgaaggaaaactaagtacagaaaatacttctgttaaagaacaatttcaacaatttatggtcatttataaccaaacctttgtgaatggagagagtcgcttagttagtgcgccattacctgaatctgtcttgattgaggaagagttaactgaaaaagcttctcggactaaaaaatctgaaaaagtcttacaacaatttcctcaagaaaaagctaatggcttatttggtcagttcttaaagctaatggtagggaataaagctgactttaaaaaagtttttggtttggaagaagaagccaaaataacctacgctagtgaaagctatgaagaagatttagaaggcattttagcaaaggttggggatgagtatagtgacgtgtttttagctgctaaaaatgtgtacgatgcagttgaattatcaacgattttagcagattcggataaaaaaagtcacgcgaaattatcttctagcatgattgtccgttttacagaacaccaagaagatttaaaaaaattcaaacgatttattcgtgaaaattgtccagacgaatatgataatctctttaaaaatgaacagaaagacggttatgcaggctacattgcgcacgcaggtaaggtttcacagcttaaattttaccagtatgttaagaaaatcattcaagatattgctggagcagaatattttttagaaaaaattgctcaagaaaactttttaagaaagcaacggacctttgataatggggtgattcctcatcaaattcatttggctgagttacaagcaatcattcatcgtcaagcggcctattatccatttttaaaagaaaatcaagaaaaaattgaacaactggttacatttcgaattccttattatgtcggaccattatcaaaaggagatgcaagtaccttcgcttggttaaaacgtcaaagtgaggaaccaattcgaccttggaaccttcaagaaaccgttgatttggaccaatcagcgacagcctttattgaacgaatgaccaattttgatacgtatttaccttctgaaaaagttttaccgaaacatagtttgttatatgaaaagtttatggtatttaatgaattgaccaagatttcttatacggatgatcgaggaatcaaagccaatttttcaggtaaggaaaaagaaaaaatctttgattatctgtttaagacgcgtcgaaaagttaagaaaaaggatataattcaattctatcgaaacgaatataatacggagattgtcacgcttagtggacttgaagaagaccaatttaatgctagttttagcacgtatcaggatttactgaaatgtggtttgacaagagcagaattagaccacccagataatgccgaaaaattggaagatatcataaaaattttaactatttttgaagatcggcaacgaattcggacgcaactttccacattcaaagggcagttctcagcagaagtactaaaaaaattagaacgcaagcactacactggctggggaagattgtcgaagaaattaatcaatggtatctacgataaagaatcgggtaaaacaattttggactatttagttaaagatgatggggtctcaaaacactataatcgcaattttatgcaactgattaatgattcacaattatcttttaaaaatgctattcaaaaagcacagtccagtgaacatgaagaaacattaagtgaaactgtcaatgaattagctggtagcccagcaataaaaaaaggaatttatcaaagtttaaaaattgtcgatgaactagtcgcgattatgggttatgcgcctaagcggattgttgtcgaaatggcacgtgaaaatcaaacgactagcactggcaaaagaagatccatccaacgcttgaaaatagttgaaaaagcaatggccgaaatcggcagcaatttattaaaagaacaaccaacgaccaatgaacagttacgagatacccgtcttttcctttactatatgcaaaatggtaaagatatgtacacgggagatgaattatcgcttcatcgtttatctcactatgatattgatcatattatcccacaaagttttatgaaagacgattcattggataacctagttttagtgggctctactgaaaatcgagggaaatctgatgacgtcccaagtaagaaagttgttaagaagatgaaagcttattgggagaaattatatgctgctggcttaattagtcaacggaaattccaacgtctgaccaagggggagcaaggtggcttgactctcgaagacaaagcgcattttatccaacggcaattagtagaaactcgtcaaattaccaaaaatgttgcagggatcttagatcaacgctacaatgccaagtcaaaagagaaaaaagtccaaatcatcaccttgaaagctagtttaacgagccaatttcgttcgatttttggcttgtataaagtccgtgaagtgaatgattatcaccatggacaagatgcttatttaaactgtgtggtcgcaaccacgttattaaaagtttaccctaatttagcaccagaatttgtttacggagaatatcctaaattccaggcctttaaagaaaataaagccacggcgaagactataatttatacaaatttgatgcgctttttcacggaagatgaaccacggttcacgaaggatagcgaaattctttggagtaacagttatttgaaaactatcaaaaaagaattaaattaccatcaaatgaatattgtcaaaaaagtagaagtgcaaaaaggcggtttttcaaaagagtcgattaaacccaaaggaccatcgaataaattgattcctgtcaaaaatggtttggatccccaaaaatatggcggttttgatagtcctgtagttgcttatacagtgctattcacgcatgaaaaaggtaaaaaacctcttattaaacaggagatactgggcattacgattatggaaaaaacaaggtttgaacaaaatcctattctttttttagaggagaaaggcttcctgcggcctcgtgtattaatgaaattgcctaagtatacactgtatgaatttccagaggggcgccggcgcttattagctagtgctaaagaagcgcaaaaagggaaccagatggttttacctgaacatttacttacattactgtaccatgcgaaacaatgtttattaccaaatcaatcagaaagtttggcttatgtagaacaacatcaaccagaatttcaagagattttagagagagtggttgactttgctgaagtgcatacattagccaagtcaaaagtccagcaaattgtgaaactttttgaagcaaatcaaacagcagatgtgaaagagattgcggcatcctttatccaacttatgcagtttaatgcgatgggcgcaccaagtacgtttaaatttttccaaaaagatattgagcgagcacgctacacgtcaatcaaagaaatttttgatgccactatcatttaccaatcgactacgggcctgtatgaaacacgcagaaaggttgtcgactagatgggctggcgaacggtagtggttaataagcattcaaaattatcctataaaaacaatcatcttgtttttaaagccattgatcaccaagaattaattcatttgtctgagattgatgttttgttgttggaaacaacggacatttcgttaaccacgatgctattaaaacgattaattgatgaaaaaatattagtgttattttgcgatgataagcgtttgccaattggtaaaattttgcccttttatggacggcatgatagtagcttgcaattgacacgtcagttggcttggacggaagaacgaaaaggtcaagtttggacagcgatcattgcacaaaaaatcaccaatcagagtttacacttagcgcaacgagactatggccaaaaggctgctgctttgttagctatgcgcgctgaattacgtctgtttgatccagccaatcgagaaggtcatgcagctcgaagttattttaatactctctttggcaatgattttacacgtgaacaagaaaatgacattaatgctggtttaaattatggttatacgttgttattaagtatttttgctcgagagttagtccagacaggttgttttacacaactaggactaaaacatgccaaccaatttaatgactttaacttagcaagtgatcttatggagccttttcgtccattggtagatcaaatcatttatgagaatagaaaagaagcatttccgataatgaaacgtaagttatttgctttgtttatgaatacgtatatgtacaagaaaaaacaaatgtttttaaccaatattgctaccgattatacaaaacatgtagtaaaagttctgaatcaagaggaggaaggagttccagagtttgggatatgagttatcgatatatgcgtctattattaatgtttgatatgccaacggacacagccagtgaccggaaagcgtatcggaagttccggaaatttttgattaatgaaggatttattatgcatcaattttcggtttacagcaaaattttgttgaatgatactgctaataaagcaatgttggctcgcttaaagcagaataatccgcaaagaggactaattacactattaaatgtaacagaaaaacaattttctcgaatgatttatttgcatggagaacaagacaatcgagttgctaattcagatgaacggattgtctttttaggagaagaatagatgagagttaatttttctttattggaagaacccattgaaattgaaaaagccacctttttaacgattaaagacgttcaaacctttgcccatctagtgaagttaatttatcaatatgatggggaaaatgagttgaaactatttgatgcgcaacaaaaagggctgaaaccaacagaattatttgttgttacggatattttaggctatgacgttaattcggctgccacgctgaaattaatctatggggatttagaagcacaattaaatgataaaccagaagtcaaatcaatgattgagaagttaactggaacaattagtcaattaattggctatgaattgttggaacatgaaatggatttggaagaagatggcatcactgtgcaggaacttttcaaagctcttggaatcaaaatcgaaacaacgagtgatacgatttttgaaaaagttatggaaattacacaagtacatcgttatttatcaaagaaaaaattattgatttttattaatgcgtgtacgtatttgacagaggatgaagtgcaacaagtggtagaatatatctctttaaataatgtggatgtcctgtttttagaacaaagagtggtccagaacagattccaatatattttggacgaaaacttttatttgagttatgaaaaagcttaaattgttattgattagtggttcattctaaactgaaatctagctatggataagtgatgcgagtacggaactttggagaaaaaataattctccgaggttttagagtcatgttgtttagaatggtaccaaaactaagcagcttatgccacttactggcgtgacgttttagagtcatgttgtttagaatggtaccaaaacttgtgtttcggtttcaggaacttcggcatcgttttagagtcatgttgtttagaatggtaccaaaacacactgctaaacgacttggcaaagagttatgttttagagtcatgttgtttagaatggtaccaaaaccgtactcacaaacaacgttgcgacatattagttttagagtcatgttgtttagaatggtaccaaaactttgctgataaaaatattataacagaaatggttttagagtcatgttgtttagaatggcaccaaaacctatagaatggtagtaggtaccgacgctaagttttagagtcatgttgtttagaatggtaccaaaacttaaacgttctattcccattcgttccgactgttttagagtcatgttgtttagttttcgcagatacgatttgattgatgtaaaaatatcgttaatatgtataaatgtgattgttatataaaaaatataagtaataaattgaagctttgctagagcaagtgacgcgattacgaaattatttaattttagagtcacgttatttattactttacgaatagagaatacgattatctataaatcaagaactaatccccaatttattgaaaatgacactccctgttttattaatatttcatgcttttgttgtactatttgatgatacaaaaaagtaaaactgaggacccaattaaagtcaagttaaccacattgaaagataaacctttcaatgtggttaaagatgcttaatgagattcatgaaacatagagagcggattaatttcctatgttctttatttgtatattttcttgggaatcattattgattgtggattaaaaagataatccgctccccgtttcaccacaggcatattcgtaatagctaaaatgaagagggctaagaagaaaagtgccaagattcggaaagaaaaccattctttaaagagtgtgtctaattgtaaaccactttccaacagaataattaagggcatatgcaagagataagggtagagggtatcttttccgagggcgcttaaaggtaactttcgtttcggcaataatgcaaaccaagaaa

SEQ ID NO: 9 - DNA, 7816 bp, Artificial Sequence
  CRISPR-Cas locus 14
cataaaaaaacctccttttggtttgtgaactgtttctacttcaaagcataaagcgtttagaaaaataagccaaatgatagggtaaggaagcaacctggatttttgacagtttagaggaagtgtctgtttttcacaataaagtgtaagaaaatgttaaatgaatcaaagaagaattagtgacgatcactgaggcaaaaaaggggaaagagataatggctgaaaaaaatagaaccaacatttgctgatttcttgaaaaaacttcgtagtttctggtttagagagaaagaatatgtttcatcgactaatagatacaagtaattgaatctcatttttgttatttaaaaaaaggtggtttgattatttaaaatattcttccagtggataatcaactaggatcagtcattttggttttttttattattatgatgattttgagaaaagagtgtgataggatgaatgaaaagggtatcatagttgtttttgtatagtttttagacggatgaagtcaaaaaaagcgccgagacagcgcttgctcctagaagctgatgacggacaaagccttattttaacttgctatattgaattgaatgctaccaatggttttattatagcatagattgtcagacttacaacaatatttttgattttgtttttttatcatgttgagaggtgaggatttaagtatggaaaaagagtatacgattggattagatattgggacaaattcggttggatgggcagtgttgacggatgattatcgattagtcgcaagaaaaatgagtattcaaggagactcgaatagaaagaaaataaaaaagaatttttggggtgcacgtttattcgaagaaggtaaaactgcacaatttcgacggatcaaacgaacgaaccgtcgtaggatcgcacgaagacgtcaaagagttttagcattacaagatatttttgcagaagagatacataaaaaagatcccaatttttttgctcggctagaagaaggagatcgtgtggaagcagacaaacgatttgctaagtttcctgtttttgctacattgtcggaggaaaaaaattatcatcgtcaatatccgaccatctaccatttgaggcatgatctagcaaactcaaaagaacaagcagatattcgtttagtgtacttagcgattgcccattgcttgaagtacagagggcactttttgtttgaaggagaattagatactgaaaatacctcggtaaccgaaaattatcagcaatttttacaagcataccaacagttctttccagaacctataggagatttggatgatgctgtccctattttgacagagcggctatctaaggcaaaacgagtggaaaaagtattagcttattatccatctgaaaaaagtactggaaattttgctcaattccttaaactaatggtcggaaatcaagcaaattttaaaaagacgtttgatttagaagaagaaatgaagttgaattttactcgtgattgttatgaagaggatttaaatgaactgctagaaaaaacaagtgacgattatgcagaattatttttaaaagcgaagggtgtgtatgatgcgattttactttcgcaaatcctttctaagtcagatgatgaaacgaaagctaagttgtctgcgaatatgaagttgcgctttgaagagcaccaacgagaccttaaacaattaaaagaactagtccgtagagacttacctaaaaagtacgatgatttctttaagaatcgcagtaagaatggatacgctgggtatgtcaaggggaaagcgacacaagaagatttttataaatttctaagaacagaactagctggattagaggaaagccaatcaatcatggaaaaaattgatctagagatctatctattgaaacaacgtacctttgcaaatggggtgattcctcatcaaatccatttagttgaaatgagagaaattatggatcggcagaaacgtttttatccttttctaaaaggggcacaaggaaaaatcgagaaactactgacgtttcgaatcccatattacgtaggaccgttggcacaagaaggtcaaagtcctttcgcttggatcaaacgtaagagtccgagccaaatcactccatggaattttgcagaagtggttgataaagaaaattcagccattgaatttattgagcgaatgacaaatcaagatacgtatttaccaaaggaaaaagttttaccaaaacaaagtttgatttatcaaagattcatgatcttcaatgaattgacaaaagtcagttatacggatgaacgtggcaaatctcactatttttcaagtgaacaaaaacgcaagatttttaacgagttgttcaagcaacatccaagagtaacagaaaaacaattgaggaaatttttagagttgaacgagcagatcgattcaactgaaatcaaaggaattgaaacgtcattcaatgcttcttatagcacctatcatgatttgttgaaattatcagatcagatggatacattattagatgatcccgatatgacaacgatgtttgaagaaattatcaaaattttgacgatttttgaagacagagaaatgattagggaacaactgaaaccgtacgaaactgtcttaggtcttccagctatcaagaaattagcaaaaaaacattatactggttggggacggctatcggaaaaaatgatccaaggaatgcgagagaagcagtcccggaaaaccattcttgattatttgatcgatgatgatgattttccttgcaatcgtaatcgaaatttcatgcaactaatcaatgatgatcatctttcgtttaaagaaacgattgctaatgaattgatcatgagcgactcaaacgtattgcttgatcaagtgaaggctatcccaggaagtcctgcggtcaaaaaagggatttggcaaagtatcaaaatcgtcgaagaaatcattggtatcatcggtaaggcacctaagaacatagtgattgaaatggcacgtgagaatcaaagaacaagccgttcaagaccccgcttaaaagccttagaagaagcattgaagaatatcgacagtccattgttgaaagactatccaacagataatcaagcgctacaaaaagatcgactgtatttatattatttgcaaaatggaaaagatatgtatacaggtgaaccactagagattcatcgtttatcagaatatgatattgaccatattattcctagaagttttattgttgataattctttagataataaggtcctagtttcatcaaaagtcaatcgtggaaagttagataatgccccggacccacttgttgtcaaaagaatgcgatcacattgggaaaagctacatcaagcaaaattgatcagtgacaaaaaactagccaatcttacaaaacaaaatctgaccgaggcagacaaggcaagatttatccaacgccagttagtcgaaacaagacagataacgaaacatgttgccaatctgttacatcagcattttaatttaccagaagaagtaagtgcgactgagaaaacaagtatcattaccttgaaatcaacgttgacaagccaattccgtcagatgttcgatatttataaggtgagagagatcaatcatcaccaccatgcccacgacgcttatttaaacggagtagtcgcaatgactttactaaaaaaatatcctaagttggcaccagaatttgtctacggaagttatatcaaaggggatatcaaccagatcaataaagcaactgcaaaaaaagaattctattctaatatcatgaaattttttgaaagtgaagaaatcatttgtgatgagcaaggtgaagtgatttggaataaaaaacgtgatctctcaacaatcaagaagacgattggcgcacaccaagtgaatatcgttaagaaagtagaaaaacaaaaaggtggattctataaggaaacaattaattcaaaagcgaatccagaaaaactaattccaagaaaagcatcattagatcctttgaaatatggtggctatggtagcccacttgtggcatatacggtgatttttatctttgaaaaaggaaaacagaagaaggtaaccaaaggaatcgaaggaattaccgttatggaacaattgagattcgaacaagacccacgagagtttctaaaaacaaaaggctatgagggcgtaaaacaatggctgatattgcctaaatatatattattcgaagcacaaggtggatatcggagaatgattgcgagtcatcaagaaacgcaaaaagctaactcattgattttacctgaaaatctagttacattgctttatcatgcaagacattacgatgaaatcaatcataaagtgagttttgattatgtcaatgcgcataaagaagggtttaatgacatttttgattttatctctgactttggggtgcgttatattttggctcctcaacatcttgaaaaaataaaagttgcctatgaaaaaaataaagaggtagatctgaaagaaatgatagatgctattttatctttattgaaatttacgttatttggtgcttctgttgagtttaagttttttgatattaagatattaaaaagatataagagtttgaccgacatttgggaagcaaccattatctaccaatcggttactggattatatgaaaggcgagtggaggtaaggaagttatgggatggagaacgcttgtaatcaatacacattcaaaattgacctatacaaacaatcatttgatttttaggaacgcagaaagaacagaaaaaatccacttgtcagaaatcgatgttctattattagaaactacggatatcacgattactacaatgttgctcaagcgtttagtggatgaaaaagtccttgtcttgttctgtgatgacaaacgattacctactgcaaaattgcagccattttatagtcggcatgatagcaatttacaattgactcggcaaatcgaatggaagaaagatgacaaagcgagtgtttggactgagatcatcacacagaaaatcaacaatcagcaacgttttttagaaaagcgtttatttactgaaaaagcagaagcaattgctcagttgactgccagtttacaattactagatccaaccaatcgagaaggccatgcagccagaatttatttccaaacattgtttggaaataaattcactagagaagcagacaatgcaatcaatgctggattagattatggatatactttattgatgagtctatttgctcgagaaatcgtcaagaatggttgcatgactcaatttgggttgaaacatgccaatcagtttaatgactttaacttagccagtgatttaatggagccgtttcgcccattagtcgatcaaatcgtgtacgaggtacgtgagaaagaatttccaataatcaaacgcagattattcgatctgttcttaacgaattattcttatgagaaaaaagagatgttcctgacaaatatcgttgcagattatacaaagaaagtaatcaaagcattaaataaagaagcgaaaggagttccacacttcggaatatgagttatcgctatatgagaatgatattaatgttcgatatgccaactgaaaccgtcgatgaccgcaaagcttatcgtcgttttcgaaaatttttgatcagtgaaggcttcatcatgcatcagttttccgtctatagtaaactcctgcttaacaataccgccaatcaggtaatgatcggtcgtttaaaagggaataatcctaagaaagggttgatcacgatccttacagtaacagaaaagcaatttggtcgaatgatttatttgactggtgaaaaagatcaaagtatcgggaatctagatgaccgagtgatctttttaggagaggagttcaatgatgaatcttaatttttcattacttgatcagccaatgaaatttgagcatgcgaatttttttatcatagaagacgtgacggtgtttgctaaaatgatccaacagctgtacacctataaagaaaatggtgaagtgaagttattcaatgaacggcatgaaacgattaaagaaagcgaattgatgatgataacagatattttgggctttgacatcaattcagccgcgacactgaaattgatttattcagatttagaaagacaattgaacgaaaagccagaagtgaagtcgatgatcactaaattgacagatacgatcagtgaactgattgagtatgaattattagaccatgagatggacttggaaagtgatgagatcacgattttagaattattcaaggcgttaggagtcaaaatagaaacgacgagtgatacgatttatgaaaaaataatcgagattttacaagtatttaagtatctgacaaaaaagaaactattaatctttatcaatgtttgttcgtatttaacgttgaaagaaatagaagaaatacgatcttatatttctttatgtaacatggatgttctttttatcgaaccaagaaaaattgcaggaatcacacaaacaatcttagataatgattattttttaatagatggtagtatggtagaataaaagaaaataagtattcaattctgaagttttgctatgaacgaatcgcgcgattacgaaactttgtcagaaaaaattttttctacgaggttttagagctatgttgaattgaatgcttccaaaaccatccatttcgtcgatatggtcatcgccctgttttagagctatgttgaattgaatgcttccaaaacagattgatacaaatctcaaaacatctgcaagttttagagctatgttgaattgaatgcttccaaaacgtagagaagcggtgctacctcttaaaccatgttttagagctatgttgaattgaatgcttccaaaacaaccagaagcgaataagcgtcctatcatctgttttagagctatgttgaattgaatgcttccaaaacagacgcccgaatgtttatcaccacaacggagttttagagctatgttgaattgaatgcttccaaaacttgcaacacaaaggtaacataggtgttgtggttttagagctatgttgaattgaatgcttccaaaaccatactgttgtgcatcgaatgcacgttggagttttagagctatgttgaattgaatgcttccaaaactagaattgaacacatgtatctagatattgagttttagagctatgttgaattgaatgcttccaaaacaataaatggacgaataataatccttagagagttttagagctaggttgaattgaatgcttccaaaacaacatacttcattaatgatcctaaaaagtcgttttagagctatgttgaattgtctgccattactagctatactggatctcagtaaaaagatgatagtgggattcactaataaaaagtacagagtcagaagaaaacacagacacttgtgttttctttttttgctcaaactggacgaaactctttactcttagtaggataggagtagaagaaaaagtggggtgtaaagatgtttagtgaaacgttggtccatttgttggaatgggtgactgcgattttgaatattttctcgattttagtcttgttggttggaatttttttagttttaaaaaatttgatgttggaacgtccattgattaaagattatgcgacacgtaatcggcgcaatgcggatattcgaaaactactagctagttacattttgttgagtttagaagtactgatcgtggcagatctcatcgaatctgtcattaaaccaacttggacagacattttaaaattagcattgatcattatcattcgcacgatcatctcttatttcttaaatttagaaattgcgagtcatgtatcgcatgaaagaagggaa

SEQ ID NO: 10 - DNA, 8221 bp, Enterococcus faecalis
attgcgaaacaagcagctaaattcccaagtgtttttaaagccgattatggtggtgtaaactcagacaaaatctttaaaatcgctcaaaccgttcgaacttggggcttagcagctgctgcattacttttattcgttgcagtgttcttaatttccaacaccattcggattacgattttatctcgtcaaaaagaaatccaaattatgcgtcttgtaggagcgaaaaacagtttcattcgttggccgttcttcttagaaggtgcttggattgggttgattggcgcaatcgtgccagtcatcattatgacgttaggctaccatcaagtttataacatgtttaacccgcagttattgcgttcgaattattcattaattcgtccagaagattttatctggaaagttaatctattaatgattgcaacaggaatgattattggatcactaggttcagttatttcaatgcgtcgtttcttgaaaatttaaaaaagtataattttgcggacaaaaaccttgccatctaagtgatttatcacatagagattgctaagatgagagaaatgtttttgttcagtaggctatcttaaaagttaaaaaatgacacataagttgactcgacttatgtgtcattttttagttaataatcaacacaccaatccatcggaaaatctgtagtagattttgtatacgggaggacctatctgatggtaaaatttattgccatatgcttaaaacgtatatattatttaagcataagcagataaccgtagattaaaattgtggaaattgttattttttctttctaaatcatgataaattaaaggggtaatagttatcataaatttctgaaaattatttattgaaaattgtatccctttacaaaaaatattgtataattaaattattaattgtcattgcttaaaggaggttctcatgtacagtataggtttagatttagggattagtagtgttggttggtcagtaattgatgaacggacaggcaatgttattgatttaggtgtccgtttatttagtgcgaaaaatagtgaaaaaaatttagaacgacgcacaaatcgaggtggacgtcgtttaattagacggaaaacgaatcgcttaaaagatgcaaaaaaaatacttgcggctgttggattttatgaagataaatcattaaaaaatagttgcccgtaccaattaagagtaaaaggattgacagaaccattaagcaaaggagaaatttataaagtgactcttcacattttaaaaaaacgtggaattagttacttagacgaagatgatacggaagcagcgaaagaaagtcaagattataaggaacaagttagggaaaatgctcagttgttaacaaaatatacgccgggtcaaatccaattacagcggctgaaagaaaataatcgagtgaaaacaggaatcaatgctcaaggtaattatcagttaaatgtttttaaagtttctgcttatgcaaatgaattggcaaccattcttaaaacccaacaagccttttatcctaacgaattgacagatgattggattgcattatttgtacagcctggtattgcagaggaagctggattaatttatcgcaaacgaccgtattatcatggaccaggaaatgaagccaataacagtccttatggtcgttggtctgattttaaaaaaacaggccaaccagcaacaaatatttttgataaattgattggcaaagactttcaaggtgaactacgagcaagcggcttaagtctatctgcacaacaatataatttactcaatgatttaaccaatttaaaaattgatggagaaataccactttcgctagaacaaaaagaatacattttagcagaattaatgaccaaagaatttactcgttttggcgttaatgatgtggttaaattgctgggtgtaaaaaaagaacgattaagtggttggcgtttggataaaaaaggtaaaccagaaattcatacattaaaagcctatcgcaattggcggaaaatttttgctgaagcagggatcgatttggctacgttaccaacagaaacgattgactgtttagcgaaagttttaaccttaaataccgaacgcgaagggattgaaaatacattagcttttgaactgcctaagttagcagaaccagtaaagtcactagttttagatcattacaaagaattaagccaaagcattagcacgcaagcgtggcatcgtttttctttaaaaacattacacttattaattccagaactaatgaacgctacctcagaacaaaatacactcttagaacagtttcagttaaagtcaggtgttagaacacggtatagtgaatataataaattaccaacaaaagatgtcttggcagaaatttataatccaacggtgaacaaaacagtgagtcaagccttcaaagttatggatgctttgttggaaaaatatggcaaagagcaaattcgttacatcactattgaaatgcctagggacgataacgaagaagatgaaaaaaaacgaataaaagaattacatgcaaagaatagtcaacgaaagaatgacagccaaagttattttatgcaaaagtctggatggagccaagaaaaatttcaaacgaccattcaaaaaaatcgtcgttttttagctaagttattatactattacgaacaagatggcatatgtgcctatacaggactgtctatttctcctgaattattggttagtgattcaacagaaattgatcatattattccaatttcgattagcttagatgattctattaataataaagtactggttttaagtaaagctaatcaagtcaaaggacaacaaacaccatatgatgcatggatggacggttctttcaaaaaaactaacgggaaatttagcaactgggatgactatcaaaaatgggtggaaagtcgccattttagtcataaaaaagaaaataatttattggaaacgcggaatatttttgacagtgagcaagtcgaaaaatttttagctagaaatctgaatgatacgcgttatgccagtcgtttagttttaaataccttacagagtttttttgcgaatcagggaacgaaagttcgagtagtgaacggcagttttactcatactttacgtaaaaaatggggtgccgacttagataaaactcgtgaaacacatcatcatcatgccgttgatgcaacattgtgtgcagtcactccgtttgtcaaggttagtcgttatcactatgcagtgaaggaagaaactggtgaaaaagtcatgcgtgaaatcgatttcgaaactggtgaaattgtcgatgaaatgtcttaccaggaattcaaaaaatcaaagaagtatgaacgaaaaacctatcaggtaaaatggcctaattttcgtgagcaattgaagccagtaaacctccatccaagaattaaattttctcaccaagtggatcgtaaagctaaccgcaaactcagtgatgccactatttattctgttcgagagaaaacggaagtcaaaacgctgaaaagtggtaaacaaaaaataacgactgacgagtacacaatcggtaaaatcaaagacatttacacggtagatggttgggaagccttcaagaaaaaacaagataaacttttaatgaaagatcttgacgaaaagacctatgaacgattgttgtctattgcagaaacaactcctgattttcaagaagtggaagaaaaaaatggtaaggtaaagcgtgttaaacgttcaccgtttgctgtttactgtgaagaaaatgatattccagcgattcggaaatatgcgaaaaaaaacaatggaccacttattcgtagtttgaagtattatgacggtaaattgaataaacatattaatatcaccaaggattcacaaggacgacctgttgaaaaaactaaaaatggtcgcaaagttacactacaaagtttaaaaccatatcgctacgatatttatcaagatttagaaactaaggcttattatacagtacaactatattattctgacttacgttttgtggaaggtaagtatggaatcacagaaaaagaatacatgaaaaaagtcgccgaacagacaaagggacaagtggtgcgtttctgtttttctttacaaaaaaatgatggtttggaaattgaatggaaagatagccaacgctatgatgtgcgtttttataatttccaaagtgctaatagtattaactttaaagggttagaacaagaaatgatgccagcagaaaatcaatttaagcaaaaaccttataataatggagccatcaatttaaatatcgctaaatatggcaaagaaggcaaaaagttacgaaaattcaatacagatattttaggaaagaaacattatctgtattatgaaaaagaaccaaagaatattattaaataaaaaagaagaaacgaaaagaaaagggttgcatgattagcgtttttgtagtaatctttaattgtagtcgacggactaccgcgtttgacgaaacgtgtctttaataattttactgataagaaattattgagaatctacaaaaataaggcattttgccgaatttaccgccctacatatgtagggcggtttttttattaaaaaggaggaaatgttgttgggatttcgaacagttttcgtaaaaaatggcgagaaattaaaagtaaagttagataatttagaagtgataaaagaagggaatacatatgtcattcctttgacagatattgaaagtgtaattttagaaggcgaccagacattcatcactacacggttactagcgaagttcgcacaacatcatattgataccgtgatttgtgataatacgttcatgcctgtaggtgtttttcttggtattggacagtatcatcgcagtgcgaaacgagcaatctggcaaagtaattggacagaagaacataaacaagtagcgtggtgcgaaattgtaacacaaaaaattcagaatcaaatcgcagttgcgaaatatttaggaacagattccgaacgagtggaagtattagaaaaacttagtgaaggaattttaccaggggatacaacgaatcgtgaaggacatgttgcaaaagtatattttcattcattgtatggtgtgggttttacccgtgaagaagagtgcttaccaaatgcctgtatgaattatggctatgcagttattcgtgcacaaatggcccgttgcgtggtagcgttaggattattaccgatgttagggattttccataaaaatgaatataattcgtttaacctaattgatgacttaatggaaccttttcgtccattaatggattggtatattcatcaaacgatattgaaaaagaatgaaaagtatttaacctatcatagtcgtttaaccttagtggaatttttacatcaaaagattaaggtgaaaaacaaaaaaatttatatgaaccaagcaatgtctgaatatgtagctgcttttgtgaaagcaatggaaacaggtgattttgaaaacgttcagaaaattcatttggtcaatatgttggagtgtgaggggaagtgagtttaggagtcgtgcgattaatgtgtttatttgatttaccctttgaaacgaaacaggagcaaaaagaataccgaatttttagaaaacatttactggaaaacggatttattatgttgcagtattctatttattatcggagtttgcccaatcgtagtgcgttaaaaaaatatgaaacaattctaaagagaaaagtaccacgttcagggaacgttcgattgttgtatgtttcagaaattcagtttcaagatatgctattattggcgggcagtcgtagtcatcaagaagaagtagttggcgttcaccgattggtggtgatttaatgaaacaaattcgtttagaatatcagtatcaacaatttattgaattctctttggaagattatgtatttttttatggaggagaaaaccaatggcgtcgtaaaatattacgaacattaaaacggtttgcgaaacaaaaagcgttaagtgacttagaagaatcagtctatggagataacggtattgaaatttttttagaagaaaaaaagttaaaggcaaagagtattgatttttactttttagaggacaatacaagtatttttcaacaaatgaattttatcaaaggtacgttacttcaccaggaattactttatttacaagatgattttgatattacaaatcaaatgagcaatttaaatgatcagttgttaaaactagaaaatttaatgaatgataaattaaataactatttaacgaatattgaaccgcattttttagaaatgaattttcaggatattttgaagtattcgttgtcattaaactatttagaaaatggccaatcgttgcctttagaaatgatggatacaagggaattgttggctgaatttatttatctcttgcaacggagtatcagccgaagagaacagcctgtctggcttgttattacaaatccagaaagttttttggagacggaatcaatttattatctctttcagcagctaaagaaattggctcaagaaacaaagcagttgaagttttttatttttagtaatagaagcttgcctttaccgtatacggaggaagatgttgagaaaacgattttgttatatgataagtatcagcagttgccagtttttgatgtttttcgtcaaagtattgagcgacattatccagatcaactctcttggacaaatcaacaactaattgatgctttttatcgagtctgtcattttgttggtgatcagtatacaaaaaattatcttttacctaaagatatgatattattaaaattgttgaaggaattgttagacgacaatagtgagtgtgtcgagacgtcgatggaaaagctcactgtattggaagaacaatattttcgcgaacggttattgcggaaagagtgagtctggaattttaaccgcgtaaagttatattttttatcaaaaggattattaatgagatttcaaattttaaatttgaggtttttgtactctcaataatttcttatcagtaaaacttgaaacacataatcattaaccgctttttggtttttatactctcaataatttcttatcagtaaaacaaaattcttctaacgtttgcgctgaaatatgtttttgtactctcaataatttcttatcagtaaaactgtttattctgcggtttctcgccaaattaagtttttgtactctcaataatttcttatcagtaaaaccacttcatataccttctaaacgagttattagtttttgtactctcaataatttcttatcagtaaaacggatgtaccagttattcttggtctttcaaagtttttgtactctcaataatttcttatcagtaaaactgttcctcttgatggtgctgacggcaaccagtttttgtactctcaataatttcttatcagtaaaactgtctctttgatggcttcctttttaaccagtttttgtactctcaataatttcttatcagtaaaacaaaaaccagatttagaaactattaaagatagtttttgtactctcaataatttcttatcagtaaaacgctttttctcctgcaaactcttcgatctgagtttttgtactctcaataatttcttatcagtaaaaccaactagttcagtaatttcgccttcactttgtttttgtactctcaataatttcttatcagtaaaacaaacgataccttataccattgaatataatggtttttgtactctcaataatttcttatcagtaaaaccgttccattgctttaaactagtatcggaaggtttttgtactctcaataatttcttatcagtaaaacagttcgcttattcccatcatggcacagaccgtttttgtactctcaataatttcttatcagtaaaactggaacatgagagtggtttaaaccctgctagtttttgtactctcaataatttcttatcagtaaaacgcacctagaacgacgtcaatcggttggttggtttttgtactctcaataatttcttatcagtaaaacgcaaaatgcccgctgctatctattcaacgagtttttgtactctcaataatttcttatcagtaaaactaaagatggcaatcctaagccaaggcttgagtttttgtactctcaataatttcttatcagtaaaacacgtgtcgtcgtaagttgttgcagtccatggtttttgtactctcaataatttcttaccagtaaaacaataaggaagtaggttggatgtacaaactcgctttta

SEQ ID NO: 11 - DNA, 8221 bp, Artificial sequence
  CRISPR-Cas Locus 16
aagtagacccggcttcagtaactgaaaaagataaaaaacctgcagatcttgaagcacacttgaaaaatcctgacttcttcgatacagcaaaaaatccaacttctgactttaaaattaccagcgtaacagatcttaaagaagcaccgaaagatgcagtagctggagctaacaaaacagtaagcggaaaccttaccctatccggaaaaacaatgaacgttacgttcccggctaaagtagacgttgcagaaggtacagcagctattcaggctaaatttacagtgaacagagcagactgggggatcaaattcggaacttctgaagcagaccctgcagaatggatgatcagcaaagacatcgaaatcgctgtagacgtaaaagctaaaaaataatattgttagatattcaattctttgagctgccttttttaaggtggcttttttttgtgctttaaatttttgtacttaaaaacctttaaatgggaaaaggcgagttaccccgccttgaatgttttcacaacggaataatccttattgtgaattgctttcggttacaaatctaaaaattatttttttaactgttttatggtttcccataaaatgattactttttttctctttatttttatgctttatgaaaaccaaatagcaatgactaaaaatatactaggattagacttaggaacgaactcaataggatgggcattgataaaacaggattttgaaaacaaacaaggtgaaattcttgggatgggaagcagaattatacctatgtctcaggatattttgggggaatttggaaaaggaaattctgtttctcaaactgcttctcggactagctatagaggtgtgagaagattacgtgaaagatttcttttgcgaagggaaagattacatagagttttaaatgttctgaactttttacccgcacattatgcttctcagatagattttgaaaagaggtttgggaaattcaaagaagaaactgagcctaagttggtttatgacgtgaatgaatttatttttaaaaattcgtttgaagaaatgctttatgattttagaaagtatcagccacagcttttagaaaatgataaaaaagttccctatgactggacgatttattatttacgtaacaaagccttaacccaaaaaatagagaaagaagaacttgcttggattcttttaaattttaatcagaagcgtggttattatcaattacgtggggaagattttgaagaagaaaaagataaaacttttgtacgcctaaaagttgataaaattgttgattcgggagacactataaagggcaaaatattatatgatgtttatttcgaaaatggctggaaatatgataaacagattgtaaaaacggaagattggatagaacgtgtaaaagaatttattgttacagaatcattcttaaaaaacggcgatataaaaagaacttttaaagctgttgattctgaaaaggattggattgctatcaaaactaaaacagaacaagaaattgataattcgaataaaaccgttgggacatacatttatgaaacacttcttcgaaatccaaaacaaaaaattaaaggaaaattggttcgtacgattgaaagaaaattctataaagatgagctgaaacagattctggaaaaacaaaaagaatttcatcttgaattaaagaatgatgatttatatagtgattgtattcgtgaattgtatcgaaataatgaagcgcatcaattgacgttgagtagaaaagattttgttcatcttttgatggaggatattattttttatcaaagacctttaagaagtcataaatcttctatttcaaactgtactttggaatttagaaaatataaagatgaaaatggagcagagcatattcaatatttaaaagcgattccaaaatcaaatccatattatcaggaattcagaatctggcaatggatttttaatctcaatatttataagagagatgacgagcaaaatcctgttacaaaaaagtttttaaacaccacccaagattttgaaaatctgtttgaatttctgaataacagaaaagaaattgaccaaaaggctttactcaaacatcttaaaataaatgagaaaacgcatcgttggaagtatgtagaagacaaaaagtatccttgcaacgaaaccaaaacaatgatttcatcaaggttggataaagttgaaaatatttctgaaaacttcctgacaagagaaattgaacagaagatttggcatattatctattctgtcaacgataaaattgaatatgaaaaagctttaaaatcttttgccaataaaaataatctggacgaagtttctttctttgaagcttttaaaaaattcccaccttttaaaagcgaatatggttctttttctgaaaaagcaataaagaaactgttgcctttaatgcgattgggaaaatattggaattatgctgatattgataaatattcaaaagacagaattcagaaaattatcaatggagaatatgatgaaaatatcaaagacaaggtaagggaaaaagcagttcatcttacgactgaaaatgattttcaaggtcagcaattgtggctggctcaatatattgtttacggaaggcattctgaagcttcaatgattggaaaatggaattctgccgatgatttggaagagtttttaaaagagtttaagcaacattcgcttcgaaatccgattgttgagcaggtcattaccgaaactttgcgcgttgtaaaagatatttggttgaaatacggaaatggagcgaaagatttctttaacgaaattcatattgagttgggaagagaaatgaaacttcctgcagatgatagaaaaaaactaacgaaccaaatttctgaaaacgaaaataccaatcttcgtatcaaggctttgctggctgaaatgataaacgaccattctgttgaaaatgttcgtccgttttcgcctatgcaacaggaaattttgaaaatttatgaagatggagtattgaattcaggtattgaaattgaagatgaatatttgaaaatcagcaaaaccgcacaaccttctccgtctgatttgaagagatacaaactttggttggaacagaaatacaaatcgccttacacaggacaaattattcctttaaataaattgtttacgccagaatatgaaattgaacatatcatacctcaaagccgatattttgatgacagctttagtaataaaattatttgtgaatcagccgttaataaattgaaggataattatatcggacttggatttattaagcaattcggagggactattattgagcttggttttggaaaaaatgtaaaggtttttgaagtcgaagaatatgaagattttgtcaaaaaacattatgcaaataatcgaagtaagagaaataaacttttattagaagaaattcctgaaaaaatgattgaacgtcagttgaatgatacacgtcatatcagtaagtatatttcaggtgtgctttccaatattgtaagagtagaagatggaacagatgaaggtgtaaattctaaaaatattgttcccggaaacggaaaaatcacaactcaattaaaacaggattggggactgaatgatgtttggaatgatttgatactgccacgttttgaaagaatgaatcaactaaccaattcaacagattttacagcttggaatgaaaatcatcaaaagtatttgccaactgttccgattgagttttcaaaaggattttcaaagaaaagaatcgaccatcgtcatcacgctttggatgctttggtgattgcttgtgctacaaaagaccacgtaaatttattgaataatcaatctgcaaaatcggagacgaaacgttacgatttgaaaaagagattgatgaagtttgaaaaagttgtttacaatcatacacaaacaggagagaaaatcgaaagagatgttccgaaaaagtttttgaaaccttgggaaaactttacggttgaagctaaaaacagtttggagaaaataattgtaagctttaagcaaaatctcagagtaatcaataaagctacaaattattatgaaaaatatgtggagaaagatggcttgaaaacgaaagaaagggtagagcagaccggaacgaactgggcgataagaaaatcattgcacgaagaaaccgtttcagggaaaattaacttgccttgggtggaaacaagcaatggagaatttattactgccacaagaaagtctttggacacaagcttcaatttggaaaaaatcaaaaaaattacggatatcggaattcagaaaattctcagaaattatcttgaggcaaaagatggcaatcccgaattggctttttcgccagaaggaattgaagatctgaataaaaatgttgaaaagtataatgatggtaaatcacatcagccaattatcaaagttcgtgtttatgaaaaaggcaaaggaaggtttgtcttagggcaaacaggaaataaaattgataaatacgttcagggttcccctaacttatttttcgcaatatataaagatgataatggtaaaaaaagttatgaaagtattcgtttagatattgcgattgaaagattaaagcaaggtttgcaagcagttccagaaacaaatcaaaatggatttgcattgtatcaaagcctgtctcctttagatttagtttacattcccacagaggatgaagttgaatcaccacatctaattgattttagtaaattagataagataaaattggaaaggatttataatgtaaatgacttctcaggatatacaatttacttcagccaaaattcatttgctaaaaacatttatcctaaagagatggatatgacctggaacgaaaaaaaacaaaaaccatcaggttcgtttgattctaaaacagcttcatacaataaaaaatcgattaaagatatttttattaaaatgaaaattgaccgtttaggaaatatttcaaaagcgtaattatgataacccgctccatctacatcggcaatcccgcttatctcaaactaaaagatgagcagatgaaaatcctctgtccggaaaccaaatcggaaaagggtagtatacctgtggaagatttgggactattgatgttggatcattttcagattacgatttcacataatctgattcaaaaaatgatgggaaataatgtggtggtggtaagttgtgatactcatcatttgccacacggaattatgttgccgttgtatgggcatacagagcattcggatcgggtaaaagaccagttggaagccagtgaacctctgaaaaaacaactttggaaacagacggtggaatgtaagattgaaaatcagaaaaacgttttaatgaagttggggaattattatgaacctatgattgaatatcaaaaaaatgtaaagtccggcgatatcaccaatatggaaggtattgcggcgcaacattactggaaatatttaatcagtcttgattttcttcgacaacgttttggagattcacccaatcagttttttaattttggatatgcagttctcagaagtattgtagcaagagctattgtggaaacaggactgcttccggtgttgggtatttttcataaaaataaatacaatccgtattgtcttgtggatgatttaatggaaccttatcgaccgtttgtggatttgctggttatgcagtggctgaaaattaatcctgggactgaagaactgacaaaagaatttaaagcatatattcttcagattgcgaccaaagatgtattgattgataataaaacaagacctttgttagtagctgtaaaaacaacagcttcttcgctttataaatgttatacaggcgaaaaacgattaatttcctaccctgaattgagatgaattccgaaaggtttaatgcataccgaattatgtgggttttagtattatacgatttaccgactgaaactaaagctaatatgaaagatgcaaaccgctttcgtaagagtttaattgatgatggttttacattatttcagttttcgatgtatgtccgccattgtccgagtcgggaaaatgctgaagtgcatatcaaaagagttaagtttatgctaccaaaagctggtaaagtcgctattatgtgcattacggataagcaatttggagatattgaaattttctttgccagaaataaagaagaaccacctccaacctttcagcaactggaattattctgattttttaaatcctaaattataaataaacccactgtaattcagtgggttaaattttgaggttgtgctgtatctcaaagatacggataaatgaaagcaattcacaacagttactgctgttgatcaaaattcttctcagttgtgctgtatctcaaagatacggataaatgaaagcaattcacaactaaaatgggcgcaattcacttgataagagtgttgtgctgtatctcaaagatacggataaatgaaagcaattcacaacaccaaaagcttgatacgattatacaactcagttgtgctgtatctcaaagatacggataaatgaaagcaattcacaacctttgcagtccatatacaccgatccgtaaagttgtgctgtatctcaaagatacggataaatgaaagcaattcacaacgaaattggacgctatgtaataatcatccatagttgtgctgtatctcaaagatacggataaatgaaagcaattcacaacagaaactctaaagcttctttttgattatcggttgtgctgtatctcaaagatacggataaatgaaagcaattcacaactgatacgttctagcagtagcggttaatgtagttgtgctgtatctcaaagatacggataaatgaaagcaattcacaacaagataaaaaaataacagaacaggattatagttgtgctgtatctcaaagatacggataaatgaaagcaattcacaacaagataaaaaaataacagaacaggattatagttgtgctgtatctcaaagatacggataaatgaaagcaattcacaactcattatgctccatattattctcctagttagttgtgctgtatctcaaagatacggataaatgaaagcaattcacaacaagataaaaaaataacagaacaggattatagttgtgctgtatctcaaagatacggataaatgaaagcaattcacaaccttataatgatagttctataaattatataggttgtgctgtatctcaaagatacggataaatgaaagcaattcacaacttagtagcataaataacagctaattgagcagttgtgctgtatctcaaagatacggataaatgaaagcaattcacaacaaagttattatttatttatatataagaaatgttgtgctgtatctcaaagatacggataaatgaaagcaattcacaacaaattggagatagtgatgaggattccttatgttgtgctgtatctcaaagatacggataaatgaaagcaattcacaacaagaggctccggaagtatcaggatacatatgttgtgctgtatctcaaagatacggataaatgaaagcaattcacaactcaattaatatgaaattgaaattactatttgttgtgctgtatctcaaagatacggataaatgaaagcaattcacaaccattaatctgaaattgaaattactatttcagttgtgctgtatctcaaagatacggataaatgaaagcaattcacaacaattctcaaactcatatccagcagtaggatgttgtgctgtatctcaaagatacggataaatgaaagcaattcacaaccgttatgaaaaagtcagttaaaaaaaatatagttgtgctgtatctcaaagatacggataaatgaaagcaattcacaactctgaaacgccataattaatttatcaggctgttgtgctgtatctcaaagatacggataaatgaaagcaattcacaacccgagaacctatccaaagaagatttgtaatgttgtgctgtatctcaaagatacggataaatgaaagcaattcacaactcgagaaataatattctggtttcacttggagttgtgctgtatctcaaagatacggataaatgaaagcaattcacaacccgaaaatggtataaagttacgttattttagttgtgctgtatctcaaagatacggataaatgaaagcaattcacaactaatttcgtacgaagtttatactcgtttaggttgtgctgtatctcaaagatacggataaatgaaagcaattcacaacctacgt

SEQ ID NO: 12 - DNA, 7304 bp, Artificial sequence
  CRISPR-Cas Locus 17
tttgaagccagaaacaggatgtcattatttttctggctcataataattctggctaaaggttccagccctttctccttagctgtatcagctttggttttttttcgctttttgaaaggcagataaaggtcttccagctcctgtatatcaaagctttcttcaattctttgctgaagttcaggcgtcaaagcattctgttcttctatcgattttaaaatggattcctttctcttaacgatctcttcaaattgcttactgatctttgaaatctgttcaatctgtatttcatcaaggtttccggttttatcttttcggtaacgggaaataaaaggaatggtgcagtcttctgctaataattgtaaggtattgttgatgctcttttcagaaatattgagctgcttctgtataaattctacggtcgtcattgttctgttttcggatcgctaaaatagggttttaaaacgaaaaaaggcgagttgccccgccttgaatgttttcacaacggaataatccttattgtgaattgctttcaaaatttatatgacaaatatagaagaaaaaatatttaatacaattatgggaatccgtaatttgaatgctttttttatttatattttaggtgatattcaaaacataactgtgatgattaaaaataaacttggcttagacttgggaacgaactccataggatgggcattgataagacaggattttgaaaacaaatacggagaaattcttgggatgggaagcagaattattccgatgtcacaagatattctgggcgattttggaaaagggaattctgtttcgcaaaccgcagaacgaacaaaatatagaagtgtgagaagattacgtgaacgatttttattgaggagagaacgactacacagacttttacatcttttaaattttcttccacaacattatgcttcacaaattgattttgaaaaaagattcggaaagtttaaagtggaaaccgaaccaaaactggcttggaaaaatattgaaggaaaattttcattccttttccaaaactctttcaatgaaatgcttgaagattttaatgcaaatggacaggatttaaaaattccttacgactggacaatttattttctccgaaaaaaagcactttcacaaaaaattgaaaaggaagaattggcgtggattcttttaaactttaatcaaaaacgtggatattatcaattgcgtggtgaggaagaggaagagaatcctaataaacaggttgagttttattctttaaaagtcatagacgttttagcagatgaacctcaaaaaggaaaatctgatatttggtattctttgattttagagaatggatggatttacagacgttcaagtaaaattccattatttgactggaaagataaaacaagagattttattgtaaccacggacttgaatgatgatggaagcattaaaaaagataaagacggaaatgaaaaaagaagtttccgtgcgccgggtgagaatgattggactttggtaaaaaagaaaaccgagcaggaaatcgagcaatctcacaaaaccgttggaacctacatttacgaagcacttcttgataatcccaaacaaaaaataaagggaaaactgattcgtaccattgaaagaaaattttacaaagaagaactcagacagattttagaaaagcaaaaggaatttcatcaggaattacaaagtgatgatttgtataatgattgtattcgtgagttgtaccgaaacaacgaatcacatcaacttattttgagcaagaaagattttgttcatcttttgatggaggatcttattttctaccaaagaccgctgagaagccagaaatcttctgtttctaactgtaccttggagttcagaaagtataaagatgaaaatggagcagaacatatacaatatttaaaagccattccgaaatctaatccttattatcaggaattccgcctttggcaatggatctacaatttaaacatttatagaaaagatgatgaagcgaatgttaccaaagattttttaaatacgacccaagatttagaaaatctgtttgagtttttaaatatcagaaaagaaattgaccaaaaaggattactaaaacattttaaactcaatgaaaaaaaacatcgttggaattttgtagaagaaaagaaatatccttgcaacgaaactaaaacgatgatttcttctcgattggataaagtggataatatttctgatgatttcctgacaagggacattgagcagaaaatttggcacatcatttattccgttaatgataaagtagagtacgagaaagccttaaaatcttttgcgagaaagtatcatctggatgaaagttctttttttgaggctttcagaaaatttccgccatttaaaagtgaatatggttccttttcggaaaaagcaattaagaaattgttggctttgatgcgattaggaaaatattggaactatgcagatgttgataaattttcaaaagacagaattcagaaaatcattaacggagaatatgatgaaaatattaaagataaagtgagagaaaaagcaataaatctcacatcagaaaatgattttcaggggttacaattgtggttggctcaatatataatatatggaaggcattcagaagcatctatgattggaaaatggaattctgcggatgatttagaaatgtttttaaaagattttaaacaacattcgcttcgcaatccgattgtagaacaggtgattacagaaactcttcgtgtggtaaaagatatttggttaaaatatggaaatggagcaaaagattttttcaatgaaattcatattgagttgggaagagaaatgaagcttcctgcgggtgatcgaaaaaaactcacgaatcaaattaccgaaaacgaaaacaccaatctccgcatcaaagctctattggcagaaatgatgaatgatcattcagtagaaaatgttcgtccgttttcgcctatgcaacaggaaattttgaaaatctatgaagacggcgttttaaattcaggtattgagattgaagatgaatatttgaaaataagcaaaacggcacagccttcttcttcagatttaaaaagatataaactttggctggaacaaaaatataaatcaccttataccgggcaaattattccattaaataaattattcacaccggaatacgaaattgaacacattattccgcaaagccgatattttgatgacagttttagcaataaagtaatttgcgagtcggcggttaataaattgaaagataattatatcggacttggatttattaagcagtttggaggaactattattgagcttggtttcgggaaaagtgtaaaggtatttaatatagaagagtatgaagattttgtaaagaaacattatgcaaacaatagaggcaaaagaaacaagcttttgatggaagatattcctggaaaaatgattgaacggcaattgaacgatacccgctatatcagtaaatatgtttccggaattctttccaatattgttcgggtagaagacggttcagacgaaggggttaattctaaaaacatcgttccgggaaatggaaaaatcactacccaactgaaacaagattgggggttgaatgatgtttggaatgatataattttaccacgttttgaaagaatgaatcaacttactaattcaaaagattttaccgcctggaatgaaaatcatcaaaagtttttacctaccgttccaattgagttttccaaaggattttcaaagaaaagaattgaccatcgtcatcatgctttagatgctttggtgattgcctgtgccacaaaagatcacgtgaatttattaaataatcaatcggcaaaatcggataccaaacgatacgatttgaaaaagaaattgatgaagtttgaaaaagtagtttattatcatacgcaaacaggggagaaaatagaaagggaaataccgaaacaatttttaaaaccgtgggaaaactttacagttgacgcaaaacataatctggaatctattattgtaagttttaagcaaaaccttcgtgttattaataaagcaactaattattacgaaaagtatgttgaaaaagacggtacaaaaaataaggaaagagtagagcagaccggaacaaactgggcgattagaaagccaatgcataaggatacggtttccggaaaagtagatttaccttgggtgaaagttccaaaaggaaaaattttaacagcaacgaggaaaagccttgatatttcatttgatttaaaatcaatagcatctattactgatacagggattcagaaaattctcagaaattatctgaaattcaaaggcagtccggaacttgcattttctccagaaggaatcgaagatctgaataagaatattgagaagtacaatgatggaaaatctcatcaaccgatcaataaagtaagagtttttgaactgggaagtaaatttcaggtaggacaaaccggaaataaaaaagataaatatgtagaagctgcaaaaggaaccaatctgttttttgctgtttatgaaaatgaaaatagaaacagaagttatgaaaccattcctttgaatgaggttatagaaagacaaaagcaaggtttatctgtggttgacttaaaaggaacaattgatttttttctttgcccgaatgatttagtttatattccttcagaagatgaacttgaaaatagtagcaacattgacttcaaaaattttaaagaagaacaaaacaaaaaaatttataaagtagttagttttagtggaagtcagttgttttttataagacaggaaattgccatatcaattgtaaataaagcagaattttccaccttgaataaaatggagcgtagtattgatgggttaatgattaaggaaaattgtatcaaattaaaagtagaccgtttgggaaatatttctaaagcatagtattatgatcacccgctccatctacatcggcaatcccgcttatctcaaactcaaagatgagcagatgaaaatcctctgtccggataccaaaacggaaaaggggagtgttcctgtggaagatttgggattactcatgctggatcattatcagattaccatttcgcacaatttgattcagaaaatgatgggaaataatgtggtgatcattagttgtgatgcacatcatttaccccacggaattatgcttccgctgtatggtcatactgaacattccgacagggtaaaagatcagctggaagcaagtgaaccgctgaaaaaacagctttggaaacaaacggtggaatgtaaaattgaaaaccagaaaaatgttctgatgaaactgggaaactattatgagcctatgattcaatatcaaaaaaatgtactgtccggagatacaaccaatatggaaggtattgcagctcagcattactggaagtatctaatcagcctggattttttaagacagcgttttggagattctcccaatcagtttttcaatttcggttatgctgttctcagaagtattgtggcaagagccattgttgagacgggactgctgcccgttcttggtatttttcataaaaataaatacaatccgtattgccttgcggatgatttaatggaaccttaccgtccgtttgttgatttactggtgatgcagtggctgaagattcatcctgatacagaagaactgtcgaaagaatttaaggctcatattcttcagattgcaaccaaagacgtgcgtattgatgacaaaacgagaccattgctggttgcggtaaaaactacggcttcgtcgctttacaaatgttatataggagaaaagcggctgatctcttatcctcaactgttatgaattccgaaaggtttaatgcataccgaattatgtgggttttagtattatatgatctcccgactgagaccaaagctaatatgaaagatgcgaaccgcttccggaaaggacttattgatgatggttttaccctgtttcagttctctatgtatgtacgtcattgtccgagccgcgaaaatgctgaagttcatattaaaagagtgaaattcatgcttccaaaagccgggaaagttgctattatgtgcattacagacaaacaattcggggatattgaaattttctttgccagaaataaagaagagcctcctccaacctttcagcaactcgaattattttaaattgcaaattctaattataaaaataatctactgattttcagtagattattttttgaggttgtgactaatcacgaagataataaattttgaaagcaattcacaacgataaaggacacgtacatgtaggtgatgtggttgtgactaatcacgaagataataaattttgaaagcaattcacaacttacgtttacgtacggggaagattcgttacgttgtgactaatcacgaagataataaattttgaaagcaattcacaacaagatgcagcgattattcttaaagaaatgggttgtgactaatcacgaagataataaattttgaaagcaattcacaactactattcgtagacgtgcgtgggaacatgagttgtgactaatcacgaagataataaattttgaaagcaattcacaactcagagagttgagaacatgtataataaatcgttgtgactaatcacgaagataataaattttgaaagcaattcacaactcttatgtagctaatcgtaaacagcaaactgttgtgactaatcacgaagataataaattttgaaagcaattcacaacattatttctttatgtatgcacagaccgccggttgtgactaatcacgaagataataaattttgaaagcaattcacaactataggaatcatcaggagccaatgtaaaaagttgtgactaatcacgaagataataaattttgaaagcaattcacaaccatcaccctttcatgaaatgctaatataatgttgtgactaatcacgaagatagtaaattttttatttttgccttgaaacagtattcctgaaattttaaatgtataaggttcaggctgttttgattctcaatacagatggaatctataccgcaattgggaagtatgattgcaaataattgaagattttcacatttcttgatatatgataagatcatacaaatctggtttttctatttttgtacccgaaaacaacaaaatttcaataaacatttttaaaacagttcaatatgaaaaaaattagcgtaattgcattagtaggagtaggattgcttttggcatcatgtgataaaggaaaaacagcagaaactgcagctaccgctcaggaacaaaccgtagcagaaagcaaaggtgaaacactggcagta

SEQ ID NO: 13 - DNA, 8221 bp, Artificial sequence
  CRISPR-Cas Locus 18
tgtgctgcgataatctggatgataagatggaatgtatttaatgtatccaaactgctgaagttgcttaaaatatttatgataactggttattgtagtgatatgcgaaaactccataagcttgctcctgctcactctgataatccatttttcattttgcttgcaagcaaggcgggcaattgcagttaacaaagcaatatgccaaacattcaattttggatcactttgaatttcatcaaggaaatcaaaccagtattgtatatcattccttttcataatcaaatagatgttgaaggtcttcacaattgtaataatacgagcccaataatttcttgaatcgaattttgccagtgatcctgaggttttgtaatgtcgaagcagaaatattcagttttctgcgaattaccttactccgcatccagccaaattcttcatcctctcttgaattagctagcttagattttagtaggttctcaatatccgaaactattaggtttctcaatgctgttaaatcatttttcgttattgtatccatttttataaattttgatttaattcaaaatttaaactttggacttacagatatcctaaaagaggaagtcacaggcataatttttctttgtatttcttattgcctgtgcaggaaatttagaaaagtgagctttaagtagtcatggaagaacaattctcgaaccattttgttgaagatttaaataatcttaaaggtttgatgtattaaagatgataattctaataaaaatgccccgaaggtagtcgaggcgctaaatgttttcacaacggaataatccttattgtgaattgctttcaaaattattgatacaaatataaaagaaaaaaaataactgtatttatgggaatccataatttgaatattttttttattactatttttatgtggtatcaaaattaatagcgatgaaaaatatacttggactggacttgggaacaaactctattgggtgggctttagtaaaacaggattttgaaaacaaacaaggtgaaattcttggaatggggaccaggataattccgatgtctcaagatattttgggcgattttggtaaagggaattctgtttcgcaaactgcggaacgtacaaaatacagaagtgtaagaagattacgtgaacgatttcttctacgaagggagaggcttcacagggttttaaacattttgaattcccttccagaacactatgcttcacagattgattttgaaaaacgatttgggaagttcaaagttgaaactgaaccaaaattggcctggaaaaatattgaaggacatttttcatttctgttccaaaactctttcaacgagatgcttgaagattttaaaacgaacggacaggatttaaaaataccgtacgactggacgatttattatctccgtaaaaaggcactttctcaaaaaattgaaaaagaggagttggcctggattcttttgaattttaaccaaaaacgtggatattatcaattgcgtggggaagaagaggaagaaaatcctaataaaattgttgaattttattctttaaaagttgtggatgttctagcagatgagccacaaaaaagcaaatcagatatatggtattctttggttttagaaaatggatggatttacagaagggcaagtaaaatatcgttgtttgattggaaagataaaacaagagattttattgtaacaactgatttgaatgatgatggaagtgttaaaacagacaaagacggaaatgaaaaaagaagtttccgggcaccgggtgagaacgattggactttggtaaagaagaaaacagagcaggaaatcgagcagtctcataaaaccgttggaatatatatttacgaaactctccttaataatcccaaacaaaaaatcaaagggaaactagttcgtacgattgaaagaaaattctataaagaagaactcaggcagatattagaaaagcaaaagcagttccatcaggaattacaaaatgatgatttatataattgttgtattcgcgagttgtacagaaataatgaagcccatcaactgactttaagtaaaaaagattttgtacatctttttatggaggatattgttttctaccaaagaccgttgagaagccagaagtcttctatttccaactgtactttggaattcagaaaatacaaagatgaaaatggagcagaacatacacaatatttaaaagccattccaaaatcgaatccatattatcaggagtttcgtctctggcaatggatttttaatcttaatctatataaaaaagataatgatgaaaacgttatcaaagaatttttaaccactacccaggatatcgaaaatctgtttgagtttttaaataacagaaaagagattgatcaaaaagctctattgaaacattttaagctcaatgagaaaacacatcgttggaattttgtagaggataaaaaatacccctgcaatgaaacgaagacgatgatttcaactcgattggaaaaagtagaaaatatttccgatgattttctgaccagggaaatcgaacaacagatttggcatattatctattctgtcaatgataaaatagaatacgaaaaagccttaaaaacctttgcatcaaaacatcatctagacgaaagttcttttttcgaggctttcagaaaatttccaccatttaaaagcgaatatggttcctattcggaaaaagcaattaagaaattgttgcctataatgcgattgggcaaatattgggattatgccaatattgatcagtcttcaaaagacaggattaagaagatcattaatggagaatatgatgaaaatataaaagataaggtaagagaaaaggcagtccatcttacgaatgaaaatgatttccagggtttacaattgtggctggctcaatatattgtatatggaagacattcggaagcatcaataacagcgaaatggaattcagctgatgatttggaagaatttttaaaagattttaaacaccactcgcttcgcaatccaattgtagagcaggtcattactgagactttacgtgttgtgaaagatatttggctaaaatacggaaaaggagcaaaagacttcttcaatgaaattcatatagagttgggaagggaaatgaaacttccggctgaagatagaaagaaacttacgagccaaattattgaaaatgaaaatacgaatctccgcatcaaagctctattagctgaaatgatgaatgatcatgctgtagaaaatgttcgtccgttttcaccccagcaacaagaaattctgaaaatttatgaggacggtgttttaaattcaggcattgaaattgaagatgaatatttaaaaataagcaaaacggcgcaaccttctccttcagatttaaaacggtataaactttggctggaacagaaatacaaatcgccttataccgggcaaatgattccactaaataaattgtttacgccagaatatgaaattgaacatattatcccacaaagtcgatactttgatgatagttttagtaataaaattatttgtgaatcggcagttaacaaattgaaggataattatatcggacttggatttattaagcagtttggaggaactattattgaacttggtttgggtaaaagcgtgaaggtttttgatattgatcaatacgaagattttgttaagaagcactacgccaataaccgaagtaaaagaaataaacttcttttagaagatattcctgaaaaaatgattgaacgtcagatcaatgatactcgttatatcagtaaatatatttccggtatactttctaatattgttcgcttagaagatggttcggatgaaggagtaaattctaaaaacattgttcccggaaatggaaaaattactacccaattgaaaaaggactgggggttgaatgatgtttggaatgacttgattttaccccgttttaaaagaatgaatcagttgaccaattcgacggattttaccgcctggaacgaaaattttcaaaagtttttgccgaccgttccaattgagtattcgaaaggtttttctaaaaaaaggatcgaccatcgtcatcatgctctagacgctttggtaattgcttgtgctacaaaggatcacgtaaatttattaaataatcaatcggcaaaatcggaaaccaaacgctatgatttgaaaaagaaattaatgaagtttgaaagagttgtttatttccatacgcaaacaggggagaagatcgaaagagaagtgccaaaacaatttttaaaaccctggaaaaattttactgttgatgctatgcataatttggaaacggttattgtaagttttaaacaaaaccttagggtcattaataaagcaacgaattattacgaaaaatatgtagagaaagatggtgtaagaaataagacaagaataaagcaaaagggaataaattgggcgattagaaaaccaatgcataaagatacggtttccggtaaagtagatttaccttgggtaaaagtcccaaaaggaaaaattttaacagcaacaaggaaaagccttgacgcttcattcgatttaaaatcaataggctccattactgatacagggattcaaaaaattctcaaaaattatttaatgcataaagacggaaatacggaattggctttttcacccgaaggaattgaagatttgaataaaagtattgagaagtataatgatggtaaacctcatcagcccatcaacaaagtaagggtttttgaactgggtagtaaatttcaggtaggacaagccggaaataaaaaagataaatacgtagaagccgcaaaaggaaccaatttgttttttggagtgtacgaagataaaaacggcaagagaagctatgaaaccattcctttgaatgaggtgattgaaaggcaaaagcaaggtttacctgtggttgacttaagaagtacaaatgatttctatttatgcccgaatgatttggtttatattctatctgatgatgagcggggtaatatgacaaatatcgattttgaaagcctttctgatgaacaagttaaaaggatatataaatttgttagttgtacaggaggtgagggacattttattccttacgcaaatgcgacagaaataataaaaaatgaaaatggtacaaatagtaaaagtgagagaatgcagaatttctatgatgggagttgtatgtttgataaaaacgccaagcccattatgataaaagaaaactgtgtaaaacttaaagtcgaccgtttagggaacattgcaaagatataattatgattacccgttcaatctacatcggtaatcccgcttatcttaagctcaaagatgagcagctgaaaatcctctgtccagaaaccaaaatggaaaaggggagtgttcctgtggaagatttgggtttgcttatgctggatcattatcagattaccatttcgcataatttgattcagaagatgatgggaaataatgtggtggtcattagttgtgatgcgcatcatttacctctcggaattatgcttccactgtatggtcatactgaacattctgaccgggtaaaagatcagcttgaagccagtgaaccgctgaaaaagcaactttggaaacagaccgtggaatgtaagatcgaaaatcagaaaaatgttctgatgaagttgggaaactattatgaaccaatggttgaataccaaacaaatgtaaagtctggggatttaagcaatatggaaggtattgcagctcagcattattggaaatatctgatcagccttgattttttgagacagcgtttcggagaatcacccaatcagttctttaatttcgggtatgcggttctcagaagtattgttgcaagggctattgttgaaacaggattattgcccgtattgggaatttttcataaaaataaatataatccttactgccttgccgatgatctgatggaaccttatcgtccgtttattgatttactagtaatgcagtggctgaaaatttatcctgatgcagaagaactggcgaaagaatttaaggctcatattctgcagattgcaaccaaagatgtgcgtattgatgataaaacaaggccattgctggttgctgtaaaaatgacggcttcgtcgctttacaaatgctatacaggagaaaaaagactgatttcttatcctgaactgttatgaacgccgaaaggtttaacgcataccggattatgtgggttttagtattatatgatctcccgactgagaccaaagcgaatatgaaagatgctaaccgctttcggaaagcgctcattgatgatggtttcaccttgtttcagttctcaatgtatgtacgccattgtccgagccgggaaaatgctgaggttcatattaaaagagttaaatttatacttccaaaagccgggaaagtggccattatgtgtatcacggacaaacaatttggagatattgaaatcttctttgccaggaataaagaagagccacctccaacctttcagcagcttgaattattctaaattttaaattctaaatataaaaataatctactgaaaaccagtagattattttttgaggctgtgactaatcacgaagataataatttttgaaagcaattcacaacattccgcttaatccatttttaaatgactcagctgtgactaatcacgaagataataatttttgaaagcaattcacaacacatctttcttgtgtcaattgcaccagttggctgtgactaatcacgaagataataatttttgaaagcaattcacaacaaccaaagctactgcagttctaagaacatcgctgtgactaatcacgaagataataatttttgaaagcaattcacaaccgtaagactgattagtactcattgcaattcgctgtgactaatcacgaagataataatttttgaaagcaattcacaacacgtattaccacaatggaaatttgaaaaatgctgtgactaatcacgaagataataatttttgaaagcaattcacaactgtcccaagcatggtttctcctaattttttgctgtgactaatcacgaagataataatttttgaaagcaattcacaacagcatagagcattgtctaaatggaactttagctgtgactaatcacgaagataataatttttgaaagcaattcacaaccagcatcagcattatctggaggattctctggctgtgactaatcacgaagataataatttttgaaagcaattcacaactaacaggacctattggtttggttacagttggctgtgactaatcacgaagataataatttttgaaagcaattcacaacaaggacacattcctaactataatccacagggctgtgactaatcacgaagataataatttttgaaagcaattcacaactgtctgatatgcttactacttcacctcttagctgtgactaatcacgaagataataatttttgaaagcaattcacaactaggtcctgaagcatcaaatccggcattcgctgtgactaatcacgaagataataatttttgaaagcaattcacaacgcgtatgaattatagacatacatttcattcgctgtgactaatcacgaagataataatttttgaaagcaattcacaacttgcatagtttgcaggaaactaagtctttagctgtgactaatcacgaagataataatttttgaaagcaattcacatgaattagtcaatacttaatctgacagttataatcaaattaaataactttaaaacagattaagtattatgacaacacaacaaaaaatcatcaaaaacaagttaggcgtacttgaattagcacaacatttaggaaatgtatcgaaagcttgtaaagtaatgggctattcccgagacagtttttatcgattcaaagaactgtatgagcaaggaggtgaattagcattacaggaaatctccagaagaaagccagtattaaagaatcgtgtagatgaagtcattgaaaaggctgttgttgatatagctattgaaaaccctgctttggggcagcttagagtaagtaatgaacttaaaaagaaaggtttcattgtatcaccaggtggagtcagaagtatttggttaagacacgacctacatacgtttaaactaagattaaaagccctagaagccaaatccgctcaagatggtgtagtccttactgaatctcaactttcagcactagaaagggctaaggaagagaaaaaagctcatggagaaattgaaactcatcatcctgg

SEQ ID NO: 14 - DNA, 8221 bp, Artificial sequence
  CRISPR-Cas Locus 19
tatcagggctctcatcctcattattgcctatccatacatttttaccgtcattggctaaaaaaatagtacaggcatttattggaatgaaagtacctgctatcaaaagctagatatatattattttggttttcattactttaaagataattttttttaataaatgcttgacaatcttgttgtgattttttataataaaagaagctgattacccattttaaaattttagaaagtagaataaaaaacaaaaaccatccttaaaaaaggatggtttgtagtcatgaaagaacaattctcgaaccattttgttgaggatttaaataagcttaaacgtttgatgtattaaagatgataattctaataaaaatgccccgaaggtagtcgaggcgctaaatgttttcacaacggaataatccttattgtgaattgctttcaaaattattgatacaaatataaaagaaaaaaattaactgtatttatgggaatccataatttgaatattttttttattactatttttatgtggtatcaaattaatagcgatgaaaaatatacttggactggacttgggaacaaactctattgggtgggcgttggtaaaacaggattttgaaaacaaacaaggtgaaattcttggaatgggagtcaggataattccgatgtctcaagatattttgggcgattttggtaaagggaattctgtttcgcaaaccgcggaacgtacaaaatatagaagtgtgagacgattacgtgaacgatttcttctacgaagggagaggcttcacagggttttaaatattttgaatttccttccagaacactatgcttcacagattgattttgaaaaacgatttgggaagttcaaagttgaaactgaaccaaaattggcctggaaaaatattgaaggacagttttcatttctgttccaaaactctttcaacgagatgcttgaagattttaaagcgaacggtcaggatttaagaataccgtacgactggacgatttattatcttcgtaaaaaagcactttatcaaaaaattgaaaaagaggagctggcctggattcttttgaattttaaccaaaaacgtggatattatcaattgcgtggggaagaagaggaagaaaatcctaataaacttgttgaattttattctttaaaagttgtagatgttcttgcagatgagccgcaaaaaagcaaatcagatatttggtattctttggttttagaaaatggatggatttacagaagggcaagcaaaatattgttgtttgattggaaagataaaacaagagattttattgtaacaactgatttgaatgatgatggaagtgttaaaacagacaaagaaggaaatgaaaaaagaagtttcagggcaccgggtgagaacgattggactttggtaaagaagaaaaccgagcagaaaatcgagcagtctcataaaaccgttggaatgtatatatacgaaacgctacttgctaatcctaaacaaaaaatcaaaggaaaattagttcgtacgattgaaagaaaattttacaaagaagagcttagacagatattagagaagcaaaaggagtttcatcaggaattacaaaatgatgacttatataatgattgtattcgtgagttgtacagaaacaatgaagctcaccaactgactttaagcaaaaaagattttatacatctttttataaaggatattgttttctaccaaagaccgttgagaagccagaagtcttctattttcaactgtactttggaattcagaaaatacaaagatgaaaatggagcagaacatacgcaatatttaaaagcaattccaaaatcgaatccatattatcaggaatttcgtctttggcaatggatttttaatcttaacctatataaaaaagataatgatgaaaacgttatcaaagaatttttaaccactacccaagatgtcgaaaatctgtttgagtttttaaacaacagaaaagaagttgatcaaaaaactttattgaaacattttaagctcaatgagaaaacacatcgctggaattttgtagaggataaaaaatacccctgcaacgaaacaaagacgatgatttcaacccgattgcagaaagtagaaaatatttccggggattttctgacgagggaaatcgaacaaaagatttggcatattatatattctgtcaatgataaaattgaatacgaaaaagccttaaaatcctttgcgttaaaacatcaacttgacaaaagttcttttttcgaggctttcagaaaatttccaccatttaaaagcgaatatggttccttttcggaaaaagcaattaagaaattgttgcctttaatgcgattgggtaagtattgggattatgccaatattgataagttttcaaaagacaggattcagaaaatcattaatggagaatatgatgaaaatataaaagatagggtaagagaaaaggcggtccatcttaggagtgaagatgatttccagggtttacaattgtggctggcccaatatattgtatatggaagacattcggaagcatcaataacagggaaatggaattcagctgatgacttggaagaatttttgaaagattttaaacaccacttgcttcgcaatccaattgtagagcaggtcattacagaaactttacgtgttgtaaaagatatttggctaaaatatggaaaaggagcaaaagatttcttcaatgaaattcatatagagttgggaagggaaatgaaacttccagctgacgatagaaagaaactcacaaaccagattactgaaaacgaaaatacgaatctccgcattaaagctctattaacagaaatgatgaatgatcatgctgtagaaaatgttcgtccgttttcgccccagcaacaagaaattctgaaaatttatgaggacggcgttttaaattcaggcattgaaattgaagatgaatatttaaaaataagcaaaacggcgcaaccttttccttcagatttaaaacggtataaactttggctggaacagaaatacaaatcgccttatactgggcaaattattccattaaataaattgtttacaccagaatatgaaattgaacacattattccacaaagccgatactttgatgacagttttagtaataaaattatttgtgaatcggcggttaacaaattgaaagataattatatcggacttggatttattaagcagtttggaggaactattattgaacttggtttcgggaaaagcgtaaaggtttttgatattgatgaatatgaagattttgtcaagaagcactacgccaataaccgaagtaaaagaaataagcttctcttagaagatattcctgaaaaaatgattgaacgtcagatcaatgatactcgttatatcagtaaatatatttccggtatactttctaatattgttcgcttagaagatggttcggatgaaggagtaaattctaaaaacattgttcccggaaatggaaaaattactacccaattgaaaaaagactgggggttaaatgatgtttggaatgacttgattttaccccgttttaaaagaatgaatcagctgaccaattcgacagattttaccgcctggaacgaaaattttcaaaagtttttgccgaccgttccaattgaatattccaaaggtttttctaaaaaaagaatcgaccatcgtcatcatgctttagacgctttggtaattgcttgtgctacaaaggaccacgtaaatttattaaataatcaatcggcaaaatcggaaaccaaacgctacgatttgaaaaagaaattaatgaagtttgaaagagttgtttatctccatatgcaaacaggggagaaaatcgaaagagaagtgccaaaacaatttttaaaaccttgggaaaattttactgtagatgttaagtataatttggacatggttattgtaagttttaagcaaaaccttagggtcattaataaagcaacgaattattacgaaaaatatgtagagaaggatggtgcaagaaataagacaagagtagagcaaaagggaataaattgggctattagaaaaccaatgcataaagatacggtttccggtaaagtagatttaccttgggtaaaagttccaaaaggaaaaattttaacagcgacgaggaaaagccttgatgcttcattcgatttaaaatcaattgcctccattactgatacagggattcaaaaaattctcaaaaattatttaatgcttaaagatggaaaccctgaattggctttttcacccgaaggaattgaagatttgaataaaagtattgagaagtacaatgatggcaaacctcatcaacccatcaataaagtaagggtttttgaactgggtagtaaatttcagataggacaagccggaaataaaaaagataaatacgtagaagccgcaaaaggaaccaatttgttttttgcagtgtacgaagatgaaaacggcaagagaagctatgaaactattcctttgaatgaggtgattgaaaggcaaaagcacggtttacctgtggttgatttaacaagtacaaatgatttctatttatgcccgaatgatttggtttatattctatctgatgatgagcgggataatatgacaaataacgattttgaaaacctttctgacgaacaagttaaaaggatatacaaatttgttagttgtacaggaggtgaggggcattttattccttacgcaagtgcgacagaaataataaaaaatgaaaacggtacaaatagtaaaagcgagagaatacagaatttctatgatggtagttgtatgcttgataaaaacagcaagcccattatgataaaggaaaactgtgtaaaacttaaagtcgaccgtttaggtaacatttcaaagatataattatgattacccgttcaatctacatcggtaatcccgcttatctcaagctgaaagatgaacagatgaaaattctttgtccggaaaccaaaacggaaaaggggagtgttcctgtggaagatttgggcttactgatgttggatcattatcagattactatttcgcataatctcattcagaaaatgatgggaaataacgtggtggtcatcagttgtgacgctcatcatttgccccatggaataatgcttccactgtatggtcatactgaacattccgacagggtaaaagatcagttggaagcaagtgaaccattgaaaaaacagctttggaagcaaaccgtggaatgcaaaattgaaaatcagaaaaatgttctgatgaaattggaaaactattatgaaccaatggttgaataccaaagaaatgtaaagtctggggatttaaccaatatggaaggtattgcagctcagcattactggaaatatctgatcagccttgattttttgagacagcgtttcggagaatcacccaatcagttctttaatttcgggtatgcggttcttagaagtattgtcgccagggctattgttgaaacaggattattgcctgtattggggatttttcataaaaataaatataatccttactgtcttgccgatgatataatggaaccttatcgtccgtttgttgatttactcgtgatgcaatggctgaaaattcatcctaataccgaagaactgtcgaaagaatttagggctcatattcttcagattgcaaccaaagatgtacatattgatgacaaaacaagaccgttgcttgttgctgtaaaaatgacggcttcatcgctttacaaatgctacacaggagaaaaaagattgatctcttatcctgaactgttatgaacgccgaaaggtttaacgcataccggattatgtgggttttagtattatatgatctcccgactgagaccaaagcgaatatgaaagatgctaatcgctttcggaaggcgctcattgatgatggtttcaccttgtttcagttctcaatgtatgtacgccattgtccgagccgggaaaatgctgaggttcatattaaaagagttaaatttatgcttccaaaagctgggaaagttgccattatgtgtatcacggacaaacaatttggagatattgaaatcttttttgccaggaataaagaagagccacctccaacctttcagcagcttgaattattctaaattttaaattctaaatataaaaataatctactggttttcagtagattattttttgaggctgtgactaatcacgaagataataatttttgaaagcaattcacaacttgttcctgactgaattctatcgatccggtgctgtgactaatcacgaagataataatttttgaaagcaattcacaacaatctcttctagtggtatccacttttttcagctgtgactaatcacgaagataataatttttgaaagcaattcacaacgctaaacttcctatcaagcagatcagaaccgctgtgactaatcacgaagataataatttttgaaagcaattcacaacgtagaaaaatcatatcctgcagttggttgggctgtgactaatcacgaagataataatttttgaaagcaattcacaacaaccgatattgatatcggtttttttgtgctgctgtgactaatcacgaagataataatttttgaaagcaattcacaacgacagaaaagataatcctgctcagattgatggctgtgactaatcacgaagataataatttttgaaagcaattcacaactaacaattaaaactactatgtcctccatctgctgtgactaatcacgaagataataatttttgaaagcaattcacaactcttttcatcgttattaaattttattttaggctgtgactaatcacgaagataataatttttgaaagcaattcacaacagaatatttcggtggatcttttcctggttggctgtgactaatcacgaagataataatttttgaaagcaattcacaactatcgtaaacactacaagatgcattcttatgctgtgactaatcacgaagataataatttttgaaagcaattcacaacgtatctttaccctatggaaaacatggaagagctgtgactaatcacgaagataataatttttgaaagcaattcacaacttcatctgctttaaacagattataacctttgctgtgactaatcacgaagataataatttttgaaagcaattcacaactaactttcaatttaggcataataacaaattgctgtgactaatcacgaagataataatttttgaaagcaattcacaacagaaatttcaataatggatacaatcctttagctgtgactaatcacgaagataataatttttgaaagcaattcacaactatccttagccttagcagaaagatcagctggctgtgactaatcacgaagataataatttttgaaagcaattcacaacgaaattggatatggtgctgtaatgaattttgctgtgactaatcacgaagataataatttttgaaagcaattcacaacacatttgagaagacattaatggctttgaaggctgtgactaatcacgaagataataatttttgaaagcaattcacaactactatccccaaattcatcattagcagcccgctgtgactaatcacgaagataataatttttgaaagcaattcacaacacctatcgttaagggaattagcgactgcacgctgtgactaatcacgaagataataatttttgaaagcaattcacaactttagttctaattgtaaatgcttcattattgctgtgactaatcacgaagataataatttttgaaagcaattcacaactacgactacggtgactcttattcatatcacgctgtgactaatcacgaagataataatttttgaaagcaattcacaacgcgactgcatgatggcaaaacgaaagcagagctgtgactaatcacgaagataataatttttgaaagcaattcacaacagtatggaaaagagaataccaatttatcaagctgtgactaatcacgaagataataatttttgaaagcaattcacaactatcgaggacacttgacttttctgaagtgggctgtgattaatcactaagataataaattttgaaggcaattcacaacatataagataacaatttaattatagagttttaagaagttcgccttttagttgaacatatattcaagcactactaaaaccatacaagagatattacaaataaatttcttaaaaatcaattttccacaattacctaaagaagtaaggagtgcattcgcaatttttgaaaatagttcc

SEQ ID NO: 15 - DNA, 6813 bp, Artificial sequence
  CRISPR-Cas Locus 20
aataaaaaagcaacctgctgtaaattagctggttgcttttgtttggttgtagtcatgaaagaacaattctcgaaccattttgttgaggatttaaataagcttaaacgtttgatgtattaaagatgataattcaaataaaaatgccccgaaggtagtcgaggctctaaatgttttcacaacggaataatccttattgtgaattgctttcaaaattattgatacaaatataaaagaaaaaaattaactgtatttatgggaatccataatttgaatattttttttattactatttttatgtggtatcaaattaatagcgatgaaaaatatacttggactggacttgggaacaaactctattgggtgggcgttggtaaaacaggattttgaaaacaaacaaggtgaaattcttggaatgggagccaggataattccgatgtctcaagatattttgggcgattttggtaaagggaattctgtttcgcaaaccgcggaacgtacaaaatatagaagtgtgagacgattacgtgaacgatttcttctacgaagggagaggcttcacagggttttaaatattttgaatttccttccagaacactatgcttcacagattgattttgaaaaacgatttgggaagttcaaagttgaaactgaaccaaaattggcatggaaaaatattgaaggacagttttcatttctgttccaaaactctttcaacgagatgcttgaagattttaaagcgaacggtcaggatttaagaataccgtacgactggacgatttattatcttcgtaaaaaagcactttatcaaaaaattgaaaaagaggagctggcctggattcttttgaattttaaccaaaaacgtggatattatcaattgcgtggggaagaagaggaagaaaatcctaataaacttgttgaattttattctttaaaagttgtagatgttcttgcagatgagccgcaaaaaagcaaatcagatatttggtattctttggttttagaaaatggatggatttacagaagggcaagcaaaatattgttgtttgattggaaagataaaacaagagattttattgtaacaactgatttgaatgatgatggaagtgttaaaacagacaaagaaggaaatgaaaaaagaagtttcagggcaccgggtgagaacgattggactttggtaaagaagaaaaccgagcaggaaatcgagcagtctcataaaaccgttggaatgtatatatacgaaacgctacttgctaatcctaaacaaaaaatcaaaggaaaattagttcgtacgattgaaagaaaattttacaaagaagagcttagacagatattagagaagcaaaaggagtttcatcaggaattacaaaatgatgacttatataatgattgtattcgtgagttgtacagaaacaatgaagctcaccaactgactttaagcaaaaaagattttatacatctttttataaaggatattgttttctaccaaagaccgttgagaagccagaagtcttctatttccaactgtactttggaattcagaaaatacaaagatgaaaatagagcagaacatacgcaatatttaaaagcaattccaaaatcgaatccatattatcaggaatttcgtctttggcaatggatttttaatcttaacctatataaaaaagataatgatgaaaacgttatcaaagaatttttaaccactacccaagatgtcgaaaatctgtttgagtttttaaacaatagaaaagaagttgatcaaaaaactttattgaaacattttaagctcaatgagaaaacacatcgctggaattttgtagaggataaaaaatacccctgcaacgaaacaaagacgatgatttcaacccgattgcagaaagtagaaaatatttccggggattttctgacgagggaaatcgaacaaaagatttggcatattatatattctgtcaatgataaaattgaatacgaaaaagccttaaaatcctttgcgttaaaacatcaacttgacaaaagttcttttttcgaggctttcagaaaatttccaccatttaaaagcgaatatggttccttttcggaaaaagcaattaagaaattgttgcctttaatgcgattgggtaagtattgggattatgccaatattgataagttttcaaaagacaggattcagaaaatcattaatggagaatatgatgaaaatataaaagatagggtaagagaaaaggcggtccatcttaggagtgaagatgatttccagggtttacaattgtggctggcccaatatattgtatatggaagacattcggaagcatcaataacagggaaatggaattcagctgatgacttggaagaatttttgaaagattttaaacaccacttgcttcgcaatccaattgtagagcaggtcattacagaaactttacgtgttgtaaaagatatttggctaaaatatggaaaaggagcaaaagatttcttcaatgaaattcatatagagttgggaagggaaatgaaacttccagctgacgatagaaagaaactcacaaaccagattactgaaaacgaaaatacgaatctccgcattaaagctctattaacagaaatgatgaatgatcatgctgtagaaaatgttcgtccgttttcgccccagcaacaagaaattctgaaaatttatgaggacggcgttttaaattcaggcattgaaattgaagatgaatatttaaaaataagcaaaacggcgcaaccttctccttcagatttaaaacggtataaactttggctggaacagaaatacaaatcgccttatactgggcaaattattccattaaataaattgtttacaccagaatatgaaattgaacacattattccacaaagccgatactttgatgacagttttagtaataaaattatttgtgaatcggcggttaacaaattgaaggataattatatcggacttggatttattaagcagtttggaggaactattattgaacttggtttcgggaaaagcgtaaaggtttttgatattgatgaatatgaagattttgtcaagaagcactacgccaataaccgaagtaaaagaaataagcttctcttagaagatattcctgaaaaaatgattgaacgtcagatcaatgatactcgttatatcagtaaatatatttccggtatactttctaatattgttcgcttagaagatggttcggatgaaggagtaaattctaaaaacattgttcccggaaatggaaaaattactacccaattgaaaaaagactgggggttaaatgatgtttggaatgacttgattttaccccgttttaaaagaatgaatcagctgaccaattcgacagattttaccgcctggaacgaaaattttcaaaagtttttgccgaccgttccaattgaatattccaaaggtttttctaaaaaaagaatcgaccatcgtcatcatgctttagacgctttggtaattgcttgtgctacaaaggaccacgtaaatttattaaataatcaatcggcaaaatcggaaaccaaacgctacgatttgaaaaagaaattaatgaagtttgaaagagttgtttatctccatgtgcaaacaggggagaaaatcgaaagagaagtgccaaaacaatttttaaaaccttgggaaaattttactgtagatgttaagcataatttggacacggttattgtaagttttaagcaaaaccttagggttattaataaagcaacgaattattacgaaaaatatgtagagaaggatggtgcaagaaataagactagagtagagcaaaagggaataaattgggctattagaaaaccaatgcataaagatacggtttccggtaaagtagatttaccttgggtaaaagttccaaaaggaaaaattttaacagcgacgaggaaaagccttgatgcttcattcgatttaaaatcaattgcctccattactgatacagggattcaaaaaattatcaaaaattatttaatgcttaaagatggaaaccctgaattggctttttcacccgaaggaattgaagatttgaataaaagtattgagaagtacaatgatggcaaacctcatcaacccatcaataaagtaagggtttttgaactgggtagtaaatttcagataggacaagccggaaataaaaaagataaatacgtagaagccgcaaaaggaaccaatttgttttttgcagtgtacgaagatgaaaacggcaagagaagctatgaaactattcctttgaatgaggtgattgaaaggcaaaagcacggtttacctgtggttgatttaacaagtacaaatgatttctatttatgcccgaatgatttggtttatattctatctgatgatgagcgggataatatgacaaataacgattttgaaagcctttctgacgaacaagttaaaaggatatacaaatttgttagttgtacaggaggtgaggggcattttattccttacgcaagtgcgacagaaataataaaaaatgaaaacggtacaaatagtaaaagcgagagaatgcagaatttctatgatggtagttgtatgcttgataaaaacagcaagcccattatgataaaggaaaactgtgtaaaacttaaagtcgaccgtttaggtaacatttcaaagatataattatgattacccgttcaatctacatcggtaatcccgcttatctcaagctgaaagatgaacagatgaaaattctttgtccggaaaccaaaacggaaaaggggagtgttcctgtggaagatttgggcttactgatgttggatcattatcagattactatttcgcataatcttattcagaaaatgatgggaaataacgtggtggtcatcagttgtgacgctcatcatttgccccatggaataatgcttccactgtatggtcatactgaacattccgacagggtaaaagatcagttggaagcaagtgaaccattgaaaaaacagctttggaagcaaaccgtggaatgcaaaattgaaaatcagaaaaatgttctgatgaaattggaaaactattatgaaccaatggttgaataccaaagaaatgtaaagtctggggatttaaccaatatggaaggtattgcagctcagcattactggaaatatctgatcagccttgattttttgagacagcgtttcggagaatcacccaatcagttctttaatttcgggtatgcggttcttagaagtattgtcgccagggctattgttgaaacaggattattgcctgtattggggatttttcataaaaataaatataatccttactgtcttgccgatgatataatggaaccttatcgtccgtttgttgatttactcgtgatgcaatggctgaaaattcatcctaataccgaagaactgtcgaaagaatttagggctcatattcttcagattgcaaccaaagatgtacatattgatgacaaaacaagaccgttgcttgttgctgtaaaaatgacggcttcatcgctttacaaatgctacacaggagaaaaaagattgatctcttatcctgaactgttatgaacgccgaaaggtttaacgcataccggattatgtgggttttagtattatatgatctcccgactgagaccaaagcgaatatgaaagatgctaatcgctttcggaaggcgctcattgatgatggtttcaccttgtttcagttctcaatgtatgtacgccattgtccgagccgggaaaatgctgaggttcatattaaaagagttaaatttatgcttccaaaagctgggaaagttgccattatgtgtatcacggacaaacaatttggagatattgaaatcttttttgccaggaataaagaagagccacctccaacctttcagcagcttgaattattctaaattttaaattctaaatataaaaataatctactggttttcagtagattattttttgagggctgtgactaatcacgaagataataatttttgaaagcaattcacaacagccccagcgggtttagctccgcctttcttgctgtgactaatcacgaagataataatttttgaaagcaattcacaaccaaatagattattttctatagacagcttcagctgtgactaatcacgaagataataatttttgaaagcaattcacaacaatttccggattaaactaaagcttttcatcgctgtgactaatcacgaagataataatttttgaaagcaattcacaactaattaattattgctgtgactaatcacgaagataataatttttgaaagcaattcacaacgctttgccacaggaagtggatatccatttagctgtgactaatcacgaagataataatttttgaaagcaattcacaactagcaataaactgtttttgaagatctccctgctgtgactaatcacgaagataataatttttgaaagcaattcacaacctggtacttggaaggggtacgggaaaaacggctgtgactaatcacgaagataataatttttgaaagcaattcacaacggtgaatacaacatgctttctaatgatcttgctgtgactaatcacgaagataataatttttgaaagcaattcacaacattttttcttttttctatcactggagacctgctgtgactaatcacgaagataataatttttgaaagcaattcacaacctatgaacctgtaaatactaagtgtgccaggctgtgactaatcacgaagataataatttttgaaagcaattcacaacaaataaaattaaggtactccctttgccctcgctgtgactaatcacgaagataataatttttgaaagcaattcacaacaaatatata

SEQ ID NO: 16 - DNA, 7929 bp, Artificial sequence
  CRISPR-Cas Locus 21
acagcagcagaccatggagcagaagtgttttttactaacttttcagacgatgacggattgtatatagtaatcggcattatttcattgaaatcgtcactgaaatttcccatccatgtagtataagctctaatgtaataaacatcttcttttaaatctgcgggtaagctgatgcttccgctgcctttaccattaatcaggggatagatttttttgctgatttgttttttattttgatcgtacaattcaacgaaaacattggtagaaatcgttgaagggctgtatccgtcaaatacaaaagaggtaaaccaaagattttcaccggcaacataattctttttactaagaagaaggtgtattttttcttgcggatagttttcctcaaattttttaagtgcttcttctgctttgttctgagaaaaataaaatggagcaataattagtgataatgcaatcaatggcttttgaaacaaacagatattcattatatggttcgtgttttaatatatttcaaaaatacatttttttctattgaaagagagataaatggtgctattatttaaataaaaatgccccgcagataggcgaggcgctaaatgttttcacaacggaataatccttattgtgaattgctttcggatacaaatctaaaaataatatttttaatcagtttacggttttccacatttatatgaattaaattcttattaatttagaaaactcgattaaaataaataaccatggcaaaaaatatacttggattagatttaggaaccaactcgattggttgggcgttaatagaagttgactaaaacaatattcctatccggattattgcaatgggttcacgtataattcctttatcaacaagtgataaagaagaatttcaaagaggtttgtcaatcactaagaatcaaagtagaacggtaagccgtactcagagaaaagggtatgaccggaaacaattgaagaaaagtaatttaaagaaaattctaaataaatataatatcttcctttcagaagaattattaaaacttccaatgcttgatttgtggaaattgagaagtgattctgcaaacccaaatgaaaatatttcgactgaacaattgggacgaattttatatatgttgaatcaaaagcgtggctataaatctgcaagaagtgaagcaaatgccgataaaaaagatacagattatgttcaggcagtaaaagggcgctacgcacagctgaaagaaagaaatcaaacaatcggacaatattttcatgaagaattgcataatgcaaatgcaaacaattcttatttcagaataaaagaagaagtttatccgagagaagcttatatagaagagtttgatacgattattaatgctcaaaaagataaacatgattttcttacagacgaagtcgttcatcaattaagaaatgaaatcatttattttcaaagaaaactaaaatctcaaaaaggattgatcaatatttgtgaatttgaaggctttgagaaaacagtttttgacaaggacaaaaacaaacacaaagtagtgtctgtcggtccgaaagttgcgccgaaaacatctccattgtttcagctttgtcgtatttgggaagttgtaaatacaattaccttaaaaataaagaatcctgaaggaagcaaatataaatggggtgagaaaattccaaatttaattgagaaagagattttagctgattatttacttaaaaatgagagtttaagttttacgaagcttcttgaaattttagaattaaataaaaatgatatttatgtaaataagcaaatattaaaaggtataaaaggcaatgaaacttatgctgttcttcagaatattttaggagataatgaacttttaaattttgatgtttcaattattccatccaattacacttcaattttggtggacaaaaaaacgggagagatattggaagagagagcaggtctcgaattagatgcttcattagaaaaagagcctttataccagctgtggcacaccatttattccctaaaagatttagatgaatgcaaaaatgctttaattaaaaggtttggattcgatgatgagattgccgaaaagttgtctcgtatcaatttcaacaaacaagcttttagcaataaatcgaacaaatcgatgagaaaaattcttccttttctgatggaaggctacgattattctcaatcttgcagtttggcggggtacaatcattctaattcgttgacgaaagatgaaagagaacagcaggtaactttaaacagattagaacttcttcaaaaaaacagtttacgacagcctattgttgagaaaattctgaatcagatgataaatgtggtgaacgcaattcttgagcaatacggaaaaccaactgaaattagagttgagctcgcacgagaccttaagcaaagcaaagacgagcgcaacgatgccgatttacaaaattcaaaaaataaaaaactcaatgaagaaattggtaaacgattggctgaattgggactgcctgctacgaaacgatatattcaaaaatataaattcatttttccatcgcttagcaaaaatctaaaagatgctcgcgttaacaatcaatgtatttattgtggagaaacatttaatttaacggaagctttaagtggtgatgcttttgatgttgaccacattgtcccgaaagctttattgtttgatgattcacaaaccaataaagtattggttcatagaaaatgtaattcgacaaaaaccaatcaaactgcgtatgattacattgctacaaaaggtgacgaacaagttcgtatttattctgaacgaattgatgattggtttaaaagaggaattatttcttacagtaaaatgcaaagattaaaggtttcacataaggaatatcttgaaagaaaaaaaataggaaaagaaaccgaaactgataagaagctttgggaaaattttatagacagacagttgagagatactcaatatatttcccgaaaatcaagagagattctacagaaagtatgcaacaatgtaactacaacagaaggcggagttacagcaaaacttcgcaatttgtggggttgggatgatgttttgatgaatttgcaaatgccaaaatataaagaattagggcaaactgtcatcaaagaatggacaagcgaccacggaaaaagaaaacatcaaaaagaagaaatagaaaattggacaaaaagagatgaccatcgtcatcacgccattgatgctttggtaattgcctgcacaagacaaggttttattcagcggataaatactttgaattctagcgatactaaagatttaatgatgaaagaagttgaaaaagcaaaaatcgaatttaatgaaaagagtacccttttagaaaaatatttaaagactcaaaagccgtttactacagaacaagtaatgaaagaagctgataaaattttagtttcatttaaagcaggtaaaaaagtagcaacaataactaaatttaaagctacaggaaaaaataaagatacaggagtaattgttccaagaggagcgttacatgaacaaaatgtttatggtaagataaaagctattgaaaaagataagtctttaaagtatttgtttgaaaattcagggaaaattgtaaatcctaaaattaaaaatttagttgaaataagactttcggaaaatgaaaatagttcaaaaatggctttatcaacattaaagaaaaatcccattttcctaaatgaagaaaaaactgatttactagaaaaggcatcatgttatgagtatgttactgttagaaagtatcctttgaacacaataaaagcaagtcaggctgatgatattgttgatgaaagagtgaaatttttagtgaaagaaagattggcccaatttggaaataaagaaaaagaagcttttaaagatacactttggttcaacgaagaaaaacaaattccgattattaccgttcgtttatttgctcgtcctgatgctaataatttacaggcaatgaaaaaggatgaaaacggtaaagaaataggatttgtagtgttgggcaacaatcatcatatcgccatttatgaggataaagacaacaagcttgtgcagcacagttgtactttttggcatgcagtggaaaggaaaaaatataacattccaccagtaattaaaaattcctcagaaatttggaatcaattattaaataaagaattcccagaaacttttttggataaattacctgcggataatctcgaattaaaatttagtatgcaacaaaatgaaatgtttattctgggattaccacaagaagaatttgaagaagcaataaaaaataatgataaatctgttttgagtaaacacatgtatttagtttggagtattgctgacggagattattggtttagacatcatttagaaacaaaaaatacagagttaaagaaaatcaatggtgcaaaagaaagcaaaagatttttcagattgcaaagtcttaaggctgtagaaaatttgacaccaatcaaggtaagactgaatcatttaggagaaataactaaaataggagaatactaacccatgataacccgttacatctacatcggcaatcccacctatctgaaactcaaagacaatcagatgaaaatcctttgtccggaaactaaaatcgaaaaggggagtgtgcctgtcgaagatttgggtttgctgatgttagaccattatcaaatcacgatttcccatcagctcattcagaaaatgatgggaaataatgttgtagttgtaagttgcgattcccatcatttgccacacggaattatgcttccattgtatggtcattcggaacattcagatagggtaaaagaccagttagaagcaagtgaaccgctcaaaaagcaactctggaaacaaactatcgaatgtaaaattgagaaccaaaaagaagttctccggcgattaggaaactattacgaaccgatgcttgagtatcaaaacaatgttaaaagcggtgatattaccaatatggaaggcatcgccgcacaacattactggaaatatctcatcagtttggatttcctgagacagcgttttggagattcacccaatcagtttttcaatttcggttatgccgttctaagaagtattgtcgcaagagcaatagtcgaaacaggattgcttccggttctcggaattttccataaaaataaatacaatccttattgtcttgctgatgatttgatggagccttaccgcccatttgtagatttgctagtcatgcaatggcttgaaatacatcccgaaaccgaagaattaaccaaagagttcaaagcccatatcctccaaattgccacaaaagatgttcggattgatgacaaaacaagacctttattaatttctgtaaaaacaactgcaacctcgctttataaatgctacaccggcgaaaaaagaatgatttcctatccagaattacagtaatttttttatgggcagcttttccgccttccgctcccaatcttttttgcagacgatttcacataaaatagtatttgagagcaagcaaaaaaggatttccgctcaagtcgggttgcaaccattataccgcaaaacaaaccatgaaaaatgaatgccgaaaggtttaacgcttaccgaattatgtgggttttagtattatacgacttaccaacggaaaccaaagccaatatgaaagatgccaaccgctttcgtaaaggcctaattgatgatggctttacattatttcaattttccatgtatgttcgccattgcccaagtcgcgaaaatgctgaggtgcacattaagcgcacgaagtttaatcttccaaaagcaggaaaagtagccatcatgtgtattaccgataagcaatttggcgacattgaaatattctttgccagaaataaagaagaaccgccacccaccttccaacaactcgaattattctaaattttaaatcctaaaaaacaacaaaacccattgaataacaatgggttgaattttgaggttgtgttatatctcaaagatactcaaaaatgaaagcaattcacaacattatcacgatgattttcaagcggtaaaagttgtgttatatctcaaagatactcaaaaatgaaagcaattcacaactgtacaagcttacggagagatacaagctttgttgtgttatatctcaaagatactcaaaaatgaaagcaattcacaacttgtatatcgtgtggcacaacaaaaaataagttgtgttatatctcaaagatactcaaaaatgaaagcaattcacaactgaaggcgggaacctatacgctagctaacggttgtgttatatctcaaagatactcaaaaatgaaagcaattcacaacatcgggccgatggggtacacgatggaacgagttgtgttatatctcaaagatactcaaaaatgaaagcaattcacaacatattattaacccaaagggcggccacgcgggttgtgttatatctcaaagatactcaaaaatgaaagcaattcacaacagattaacgacgcgatcgctaaagcttacggttgtgttatatctcaaagatactcaaaaatgaaagcaattcacaacaggagcgcaaacaattgcagtattaactgggttgtgttatatctcaaagatactcaaaaatgaaagcaattcacaacgaagcccgcgaagaggatttagatacacttgttgtgttatatctcaaagatactcaaaaatgaaagcaattcacaacaaaacctttatgatggctcaacagagttttgttgtgttatatctcaaagatactcaaaaatgaaagcaattcacaacatgtcagcatcttgctctaatgcggcacttgttgtgttatatctcaaagatactcaaaaatgaaagcaattcacaacgacaagcggaatgatcttagtatctaaaaagttgtgttatatctcaaagatactcaaaaatgaaagcaattcacaactatttagacaaaatgagggattacgcttcagttgtgttatatctcaaagatactcaaaaatgaaagcaattcacaactcaaaagatagtgggaggtttatttgaaacgttgtgttatatctcaaagatactcaaaaatgaaagcaattcacaacatctgtaattaccaatagttttatggatgggttgtgttatatctcaaagatactcaaaaatgaaagcaattcacaacagtcttcaaacgctgatattaatttatctagtgttatatctcaaagatactcaaaaatgaaagcaattcataacgggcaaatctgtcatcatttcagttggactgttgtgtaatatctcaaagatactcaaaataaaagcaacgaaatagtgtcacatcccaaagaatattcataaaagatattcctatttttgcgaatgatttactttctagtggtgtcaaatattttgacttttatagttttcggagcagataaatggtatgccaaaaaaagcaaaagaagagtttcagaactatttcttctgagtttgacttttttaggaggtactttgggagcattgttagcgatgatgatttttagacataaaacatcaaaaaaatcttttattcttaaacttcttatcgtaatttttgttcagctaattatatttggaataatgaagaattctaaaataaattttaacattttttaataccacaacaatcggaataggcatcatattttcttacatatctatcataacaccaaaaaatattattatgtcaaagaaaattgcaattctagcaacaaacggatttgaggaaagtgaattgaaatctccaaaagaacatttggaacaacagggttggacggctcatattattagtccagaatcgggtaccataaaagcatgggcagaaaaagattggggaaaagaatacaatgttgataaaacaattagtgaatcgagcgcatcagattatgatgctttg

SEQ ID NO: 17 - DNA, 6931 bp, Artificial sequence
  CRISPR-Cas Locus 22
gtataaatcttccagctcctgaatatcaaagctttcttcaattctttgttggagttcaggtgttaaagcgccctgttcatctatagattttacaatagattcctttcttttgacaatctcttcaaactgcttgctgatctttgagatctgttcaatctgaacttcatccaaattccctgttttatcctttcggtaacgggaaataaaaggaatagtgcagtcttctgctaataattgtagggtattgttgatgctcttttcagagatattaagctgcttctgtataaattctacggtcgtcattgttctgttttcggatcgctaaaatagggtttttaaaaagaaaaaagacgagttgccccgccttgaatgttttcacaacggaataatccttattgtgaattgcttttcaaaattattaatacaaatatagaagaaaaaaatttaccataactgtggaaatccgtaattcagatattttttttatttctatttttatgtagtatcaaaagttagaatgatgattaaaaatatacttggattagacttaggaaccaactcaattggttgggcattaatagaagttgatgaaaataatattcctatccgaattgttgcaatggggtctagaataattcccttgtcaacaagtgataaagaggagtttcaaagaggtttatcaattacaaagaatcaaagtagaacggtaagtcgtacccagagaaaaggttataataggaaacaattaaagaaaaatgatctaaagaaaattctaaataaatacaatatttttccatcagaagaattgttaaaacttccaatgcttgatttgtggaaattaagaagtgactctgctaatcccaatgaaaatatttctgcagaacaattaggacgtattctttatatgcttaatcagaaaagaggttataaatctgctagaagtgaggctaatgctgataaaaaagatacagactatgttcaggaggtaaaaggccgttatgctcagttgaaagagagagagcagactattgggcagtatttttatgaagggctttctaccgctttttcagacaaagataatcggcagtattttagaatcaaagaagaagtttatccaagagaagcttacgtagaagagtttgatactatcattaatgctcaaaaagataagcatgattttcttacagataaagtagttcatcaattaagaaatgaaatcatttattttcaaaggaagctgaaatctcagaaaggattagttagtatctgtgaatttgaaggttttgagaaaactgtttttgataaggaaaaaaacaaaaataaagtggtgtttattgggccgaaagtagctcctaaaacgtctccattgtttcagctttgccggatttgggaagtcgtcaatacgattactttaaaaataaaaaatccagaaggaagtaaatataaatggggtgaaaaaattccggatttaaaggagaaagaaattttagcagattatttatttaaaaacgaaagtgtaagttttagtaaacttctcgaaattttaggattaaaaaaagaaaatgtatatgtgaataagcaaatcctgaaaggtattaaaggaaacgaaacatatgcagctctttataatgttttaggcgataatgaacttttgaattttaatgtatctatcattacttcaaatcatactgcgatattgatagataagaaaacaggcgaaattcttgaagaaagagctggccttgaacttgatgcatttttggaaaaagagccgttatatcaactgtggcataccatttattccctgaaagacttagatgaatgtaaaaatgcgttaattaaaaggtttggtttcgaagaagacattgccgaaaaattatcttgtatcgattttaataaacaggctttcggtaataaatcgaataaatcgatgagaaaaattcttccttttctgatggagggctatgattattctcaatcctgcagcttggcgggctataatcattctaattctttaactaaagatgaaagagaacaacaaattactttagaccgattagaacttctttccaaaaatagtttgagacaacctattgttgagaaaattctgaaccagatgattaatgtagttaatgcaattcttgagcaatatggaaaaccatctgaaattagagttgaacttgcccgtcaacttaaacaaagtaaggacgagcgaaatgaaactgatttgcaaaactctaaaaataaaaagctcaatgaggaaattggaaaacgattagcggaattgggactgcctgtaaccaagcgttatattcaaaaatataaattcatttttccatcacttagtaaaaacctgaaagatgctcacgtcaataatcaatgtatttattgtggagaaaccttcaatttaacagaagctttgagtggggatgcttatgatgttgaccatattgtaccgaaaactttattatttgatgactcacaaaccaacaaagttttggttcatcgaaaatgtaactcgacaaaaactaatcaaactgcgtatgattacattgctacaaaaggagatgaacaggttagggtatactcagaacgggtggatgactggttcaagagaggaattatctcttacagtaaaatgcaaaggttgaaagtttcacacaaagaatatcttgaaagaaaaaaacttggaaaagaaacagagacggataagaagctttgggaaaacttcatcgacaggcagttgagagatactcaatatatttctcgcaaatcaagggaaattttgcagaaagtgtgcaataatgtaacaacaacagaaggtggagtgactgcaaaactgcgtaatgtatggggttgggatgatgttttaatgaatcttcaactgcctaaatataaagaattagggcaaactttcaccaaagaatggacaagcaaacatggaaaaagaaaacaccaaaaagaagaaatcgaaaactggacaaaaagagatgatcatcgccatcacgccattgatgctttgataatagcttgtacaaaacaaggctttattcaacgaataaatactttgaattcgagtgagacaaaagatttgatggtaaaagaagttgagggagctaaaatagaatttaatgaaaaggctacgcttttagaaaaatacttaaaaactcagaaaccttttgatacacatgaagtaatgaaagaagctgataagattttaatttcatttaaagcaggaaaaaaggtagcaacaataactaaatttaaagcaacaggaaaaaataaagagacgggggtaattgttccgagaggagctttacacgaacaatctgtttatggtaaaataaaagtaattgagaatgataaacctttaaaatacttgtttgaaaactcagataaaattgtaaatccaaaaattaagaatcttgttgaaacaaggctcacagaaaatgaaaataattttaaaaaggctttatcaacattaaagaaaaatccaatctttttcaatgaagaaaaaaccgagatattagaaaaagcatcttgctacaatgatgccactgttttgaaatataagttacaaaatataaaagcaagtcaggccgatgatattgttgatgaaagagtgaaatctttagtaaaagaaagacttgctcaatttggaaataaagaaaaagaagctttcaaggatattctttggcttaatgaagaaaaacaaattccgattataacggttcgtttgtttgcccgtccagatgcagataatttacaggctattaaaaaagataaatatgggaatgagataggattcgttgtgacgggaaataatcatcatatcgcaatttatgaagataaagacaataagcttgttcagcatacttgtacattttggcacgcaatagaaagaaaaaaatacaatattcctgctgttattggaaattcatcagatatttggaaccaattattagacaaagaacttccaatatcatttttgaataaattaccgatggataagctcaatttaaaatttagtgtgcagcaaaatgaaatgtttattctggggttatcacaagacgaatttgatgagacaattaaaaataatgataaatctttattgagtaaatatttgtatttggtttggagtattgcagaaggtgattattggtttagacaccatctggaaacaaagaacactgagttaaagaaaactgatggagcaaaggaaagtaaaagatattatcgattaagttcaaaaggttttattgacttaaatccaataaaagtcagactgaatcatttaggagaaattaccaaaataggagaataataattatgatcacccgctccatctacataggcaaccccgcttatcttaaacttaaagatgagcaaatgtatattttggagccttccacaaaagaaatgaaaggtaaagttccggtggaagatatgggtttgttgatgttggatcatttccagattactatatcgcatcaattgattcagaaaatgatgggaaataatgtggtagtggtgagctgcgatagccaccatctgccacacggaattatgcttccgctgtatgggcacactgaacattctgatcggatcaaggatcagttggaagccagtgaaccactcaaaaagcaactttggaaacaaactgttgaatgtaaaattgaaaaccagaaagaagttttaaaacgcttaggaaattattacgacccgatgattgattatcagaatagcgtgaaaagtggcgatattaccaatatggaagggattgcagcacaacattactggaagtatctcatcagtttggattttttaagacagcgttttggagattcacccaatcagtttttcaattttgggtattcagttctaagaagcattgttgcaagagcgattgtagagaccggattacttcctgttctcggaattttccataaaaataaatacaatccttattgtcttgccgatgacctgatggaaccttatcgcccttttgttgatttattagtaatgcaatggcttgcacttaattcagaaactgaagaattaactaaagaatttaaagctttcattttacagattgcaaccaaagatgtgaaaatagatgataaaaccaggccattattggttgcagtaaaaacaacagctacatcactgtataaatgttatacgggagaaaaacgtctgatctcttatcctgatctgatatgaatgccgaaaggtttaatgcataccgaattatgtgggttttagtattatatgatttaccaacagaaactaaagccaatatgaaagacgccaaccgctttcgtaaatcattgcttgatgatggctttaccttatttcagttttcaatgtacgtaagacactgtccaagtcgtgaaaacgctgaagttcatattaaaagagtaaaatttatgcttcccaaagccggaaaagtggccattatgtgtattacggataaacagtttggagatattgaaatattcttcgccagaaataaagaagaaccaccgccaactttccaacaactcgaattattctaatttttaaattctaaataaataataaatccgttgattttcaacggattaaattttgaggctgtgactaatcacgaagataataatttttgaaagcaattcacaacactgcatgaactgctttaaaaacaccatttgctgtgactaatcacgaagataataatttttgaaagcaattcacaacctgttccaaggcaggaagaaaaaacggcctgctgtgactaatcacgaagataataatttttgaaagcaattcacaacagtttaataagttctttgcagcctgttttggctgtgactaatcacgaagataataatttttgaaagcaattcacaacccttgacttaatgcattgttgtaaagacgggctgtgactaatcacgaagataataatttttgaaagcaattcacaactaaacaacaagagtcaaagtcttgtgtgctgctgtgactaatcacgaagataataatttttgaaagcaattcacaactcttgcgcgtaaatattgactaatacaacagctgtgactaatcacgaagataataatttttgaaagcaattcacaacaaattgaattaggtttggatatcggaataggctgtgactaatcacgaagataataatttttgaaagcaattcacaactgtagaagttagtaaccaacaacgtagtgcgctgtgactaatcacgaagataataatttttgaaagcaattcacaaccaagatgtaaatgttcaatatgttcagaaggctgtgactaatcacgaagataataatttttgaaagcaattcacaacagaagcaatcttatctgtatccgaacttttgctgtgactaatcacgaagataataatttttgaaagcaattcacaaccccgacgatgtccttttgcctggatgaattgctgtgactaatcacgaagataataattttatgctgtcaattttaaaaatatacaataaaaaccaaaatttttcatttcttgatgtatgttaaggtcacagaaataaagtttctttacttttggaatcttaaaatacaaacttttttaaacaattcaatatgaaaaaaattagcgtaattgcattagtaggagtaggattgcttgtagcatcatgtaataaaggaaaatcagcagatactgcagctacagctcaggagcagaccgttgcagaaagcaaaggagaagtattggcggtagatgctgcaacttctgtagtaaactggaaagcatatcacaaaggaggtatggcacctcgttggggaacacttagcgtaaaatcaggagatatcagtgttgatggaggtcaggtttctgcaggaaactttgtaatcgatatgaactctatcaaagtagatcctgcttcagtaa

SEQ ID NO: 18 - DNA, 8221 bp, Artificial sequence
  CRISPR-Cas Locus 23
cataatggttttgttgctttcgtacaaactcgaatcatggtaatcgctctaaatctcttacaatggattcaatctcgctttcagtgatattttcggagacgtaggcagaacgtaaatagttttttaaatcttccttaagcaacacttgttcactaacgattatgtccgtaaaccgttggtgttcctctaatcatttggtttatgaacatgaggttttaatgtaggatgcttaggcttcgtttcggggttaactctccttcttaaatcatcttttccttcttctgtctttggttttggtcctggtttaattgcttgaattgtttccataataaatacttttttaaaaattagttactaaacccatcttttagaagggctttgagacaaataacagtattagggttttaagtacattacggaaaacctttttacaagtaaataattataaaacttactttatttactcattctaattcaagtggatctattaataatagaagtatgctatttaattaaaaaatagcaattacaattaggtgctattttattgcattcaatttgtgcttgcgaaacatattaaataaaatccatagaaaaaggcgagtctccccgccttaaatgttttcacaacggaataatccttattgtgaattgcttcaaaattgtattgcaataatacaataaaatattattctataattatggttttccataaaactgttaattttcttttgattaaatttaaaaattaatttagataaccagaaaatcattataaaaaatagtttgaaatgaaaaaaatattaggattggacttggggacaaatagtattggatgggctttgattgaaattgataaaaataatattcctattagcattattgcaatgggttctcgaataatacctttatcatctagtgataaagaagagtttcaaagaggtttgtcaataacaaagaatcagagtagaacggttagccgcactcaaagaaaaggatatgaccggaaacaattaaaaaaaagtgatctaaagaaaattctaaataaatacaacatttttccttcagaagaattattaaaacttccaatgcttgatttgtggaaattaaggagtgattctgctaatccaaatgaagatatttctgccgaacaactaggccgtatattgtatatgctaaatcagaaaagaggctataaatctgctagaagtgaagcgaatgctgataaaaaagataccgattatgtacaagctgtaaaaggacgttatgctcatttgaaggataggactcagactattggccaatacttctttgaagaattagacaatgcaaatactaataattcttattttagaataaaagaagaagtttatcccagggaagcttatacagaagaatttgacgccataattaatgctcaaaaaggtaaacacgactttcttaccgatgaagttgttcatcaattaaggaatgaaatcatttattttcaaagaaaactgaaatctcaaaaaggattagtgagtatttgtgaatttgaaggttttgagaaaactattttcgataaggaaaaagacaaaaataaagtggtacttgttggtccaaaagttgctccaaaaacctctcctctatttcaactttgccgtatttgggaggttgtcaatacaattacattaaaaataaaaaatccagaaggaagcaaatacaaatggggtgaaaaaattccaaatttaaaagagaaagaaattttagcagattatttgtttaaaaatgaaagcttaagttttagtaagcttcttgaaattttagaattaaaaaaagaaaatgtttatgtgaataagcaaatccttaaaggtcttaaaggaaacgaaacttattctactatccatagtattttaggagataatgaacttttaaattttgatgtgtctatcattacttcaaatcatacatcaatgttggtagacaaaaagacgggagaaattttagaagaaagagcgggtcttgaacttgatgcatcattagagagagaacccctatatcaattgtggcatacaatctattcattgaaagatttagatgaatgtaaaaatgccttaatcaaaagatttggttttgatgatgaaattgctaaaaaattatctcgtattgattttaataaacaggctttcggaaataaatcgaataaatcgatgaggaaaattctaccttttctgatggaaggctacgattattctcagtcttgcagtttggctggttataatcattctaattctttaacgaaggatgaacgagaacaactaatcactttagaccagttagcactccttcctaagaacagtctcagacaaccaattgttgagaaaattctgaatcagatgattaatgttgttaacgcaattcttgaacaatatggcaaaccctctgaaattagagttgaactcgcacgtgaacttaaacaaagtaaggacgagcgaaacgatacagatttacaaaattcaaaaaataaaaaactcaatgaggaaatcagaaaacgattggttgaactgggattacctgtaactaaacgatatattcaaaaatataaatttatttttccttctcttagtaaaaatctgaaagatgctcacgttaacaatcaatgtatttattgtggagaaacatttaacttaacggaagctttgagtggtgatgcctacgatgttgaccatattgtgccgaaagctctattatttgatgattctcagaccaataaagttttagttcacagaaaatgtaattcaacaaaagacaaattaacagcatacgattatatttctacaaaaggaatagagcaagttagagtatattctgaacgtgtggatgattggttcaaaagaggtattatttcttatagtaaaatgcaaaggttgaaagtttcacacgaagaatatctggaaagaaaaaagataggaaaagaaacagagactgataaaaaactttgggaaaacttcatcgagagacaattgagagatactcagtatatatctcgtaaagcaagagaaattttacataaattatgcaacaatgtgactacaacagaaggcggagttacagcaaaacttcgtaatttatggggttgggatgatgttttaatgaatctacaaatgcctaaatacaaagaattaggacaaaccgtcatcaaagaatgggcaagcgatcatggaaaacgaaaacaccaaaaagaagaagtcgaaaactggacaaaaagggatgaccaccgccatcacgccattgatgctttggtaattgcttgtacaaaacaaggttatattcagcggataaatactttgaattcaagtgataccagagatttgatgataaaagaagtggaagaagcgaaaatagaatttaatgaaaagtcaacacttttagaaaaatatttaaaaactcaagagccgtttactactcaagaagtgatgaaagaggctgataagattttaatttcttttaaagctggcaaaaaagtagcaacaataactaaatataaagctacaggcaaaaacaaaaatactggtgttcttgtcccaagaggagctttgcacgaacaaaacgtttatggcaaaataaaagtgattgaaaaggataaatctttaaaatacctattcgaaaattcagataaaatagtaaactctagtattaaaaaacttatagaagtaaggcttttggataatgaaaataattctaaattggctttatcctctttaaagaaaaacccgatttttctaaatgaagaaaaaaaagaagtattagaaaaagcgtcttgttatgagtatgtcactgttaaaaaatatcccttgaacacaataaaagccaaccaagctgatgatattgttgatgaaagagtgaagtttttagtaaaagaaagattatctcaatttggaaataaagaaaaagaagcttttaaagatacgctttggtttaatgaagaaaaacaaattcctattattactgttcgtttatttgctcgtccagatgcaaataatttgcaggcaataaaaaaagataagaacggtaaagaaataggatttgtagtgacgggaaacaatcatcatattgcaatttatgaagacaaagacaataaacttattcagcacagttgtacattttggcatgcagtagaaagaaaaaaatacaatgttccaaccgttattaaaaattcatctgatgtttggaatcaattattacacaaagaattaccagaatcatttttaaataaattacctgctgattatctcaatttaaaattcagtatgcaacaaaatgaaatgtttattctgggcttatcacaagaagaatttgatcaagcaattaaaaagaataataagcccttattgagtaaacatttgtatttagtctggagtatcacagatggagattacttttttagacatcatttagaaactaaaaatacagaattgaagaaaacagacggagcaaaggagggtaaaagatattttcgattaagtacaaaagggcttacagatttaaatccgataaaagttagattaaatcatttaggagaaataactaaaataggagaatattagttatgataaaacgaacccttttcttcggtaatcctgcttatctgagtaccaagaatgagcaaattctaatttcttatccagacaaggaacaggagagtaaaacagttgctattgaagatattggagtaatcgttttggaaaaccaacaaattaccattactaatggattattagaaaaattgacccgtaataatgtagcattgattaactgtgatcaacagcacttgcctattggtttattgatgcccttaagcggacataccgaacaaacggaacgttttaaaaaccaaatcaatgcatctgtcccgcttaaaaagaatttgtggcaacaaaccattagttccaaaatatctaaccaagcaggactgctcaaagaaaaaggaattccgtgccgaaaaatggaactatgggcaaaagaagttacctcaggtgatgcactcaatcacgaatcgagggcagccgtattttattggcaaaacttgattacagtagaaaatttcacccgaggacaaaaaggaattcctcctaataatttattgaattatggctatgctattttacgagcgattacggcaagagcgattgttagttctggaatgttacccaccttaggaattttccatcgcaacaaatacaatgcttattgtctagccgatgatattatggaaccctatcgcccttatgtcgatttgattgtttgccatatcatggaaactgaagattcttacgacgaattaactatcgaaattaaaaagcaattactaggtattgccactattgatgtgtttatagatggaaaaaatagcccgttaatggtagccatgagccgcacaaccaattcgctacacgaatgttttgaaggaacagctaggaaaattttataccctttgtatgtatgatgaacattacagccgtttaaaccaatatagaagtttgtggatattagtattttttgatctgcccaccgaaacacgcaaggagcgtaaaattgctagtggatttcgcaagaaattattagacgatggtttttctatgtttcaattttcgatctatatgcgtttttgtgccagtagagaaaatgccgaagtacatagcaaaagaattaaaaatagtttaccggagcacggcaaaattggcgtgatgcaaatcaccgacaaacaatttggcatgatggagcttttttatggtaaaaaaccagtagaaccagaaaaaccctctcaacaattggaattgttttaattttgctagaataaaaaaatcgattagaacactatcgttctacctcttaccccttattctttttccatttctacaactacttataactgccaacatatcaaccgattaaatcgaggtatgttgggaatcataagtaaaaatacaattttgaaagcaattcacaacaaacaagaaggaattaacacagctatcgaagttgggaatcataagtaaaaatacaattttgaaagcaattcacaaccaagtacccattttcgcgtagcaagagccgttgggaatcataagtaaaaatacaattttgaaagcaattcacaacgtgcaatgaaaaagggtgatgttcaggactgttgggaatcataagtaaaaatacaattttgaaagcaattcacaactggaatggaccaaggattcaacgatcctacgttgggaatcataagtaaaaatacaattttgaaagcaattcacaacaggtgtagggttaactccgacaggttttaggttgggaatcataagtaaaaatacaattttgaaagcaattcacaactacaaacaaatgattcaagtgaaaattttagttgggaatcataagtaaaaatacaattttgaaagcaattcacaacattctttaaatactttcttaatatctcttagttgggaatcataagtaaaaatacaattttgaaagcaattcacaacgtgcaatgaaaaagggtgatgttcaggactgttgggaatcataagtaaaaatacaattttgaaagcaattcacaacaaagctactatacttcacttttttataatgttgggaatcataagtaaaaatacaattttgaaagcaattcacaacagatgaaagttctattttgaaaaattatagttgggaatcataagtaaaaatacaattttgaaagcaattcacaactgtctgagaatttaatcatttcttttcgaagttgggaatcataagtaaaaatacaattttgaaagcaattcacaactaaatttgaagcgtttaaaaataccccaccgttgggaatcataagtaaaaatacaattttgaaagcaattcacaacagaaactaagtgttttacttttccgtcgagttgggaatcataagtaaaaatacaattttgaaagcaattcacaacgaaagctcgtaatgtcgaaacagctgttttgttgggaatcataagtaaaaatacaattttgaaagcaattcacaacataagtttgttgaacaataccaacgagaatgttgggaatcataagtaaaaatacaattttgaaagcaattcacaactgggtatccatgaaagaaatgaattaatagttgggaatcataagtaaaaatacaattttgaaagcaattcacaactcatcagcgggtctttctcctgctgatagggttgggaatcataagtaaaaatacaattttgaaagcaattcacaacattttagatattgctaaaaaaaatcctaaggttgggaatcataagtaaaaatacaattttgaaagcaattcacaactcttcgggtgttggtctgtaaattttaagagttgggaatcataagtaaaaatacaattttgaaagcaattcacaacacaatcaaaacaaatcaatctggcaacacagttgggaatcataagtaaaaatacaattttgaaagcaattcacaacagaaaccgttaacggtggaacaagtcaaacgttgggaatcataagtaaaaatacaattttgaaagcaattcacaacaattttgtgaacatggtttattttatgcaagttgggaatcataagtaaaaatacaattttgaaagcaattcacaaccatccaaactgcgtttagccacttcggtatgttgggaatcataagtaaaaatacaattttgaaagcaattcacaactagttgtagatgttttatcagcatctacatgttgggaatcataagtaaaaatacaattttgaaagcaattcacaacacagcggcgtcgatgttgttgtttagttcagttgggaatcataagtaaaaatacaattttgaaagcaattcacaacataatatgataaaatatatcaaaaagtgagttgggaatcataagtaaaaatacaattttgaaagcaattcacaacgaatggggtgtaaatgatttttttgcattgttgggaatcataagtaaaaatacaattttgaaagcaattcacaacgcaaaaagctgtgtgttgttgatgaagaaagttgggaatcataagtaaaaatacaattttgaaagcaattcacaacaaaatagctattgaaaaagcacgtgattcgttgggaatcataagtaaaaatacaattttgaaagcaattcacaactaattttaggatcatcttctaaagtgaattgttgg

SEQ ID NO: 19 - DNA, 8221 bp, Artificial sequence
  CRISPR-Cas Locus 24
ataaatacctgtcttctgataaaatggagggacgttttcctggtacaaaaggcaataatgaagcggcatcttacattaaaagatatttcaaaaaatatggtcttaaggaattcaacagaaattactatcaaacttttaaactatttgtaaaagaaggaatcaataaagtgaaatcggatagtgtcaatactcaaaatgttgtagggtatctcgaaggttctgatgaaaagctaaaaaatgaatatatagtaataggggctcattatgatcactggggctggggaggacaaaattcgggaagtaaaaagaaagaagctttcgccattcataacggagcagatgacaatgcatccggggtttcggctttgttgtgtatacttcaggaattatcaaatgctaaagtcaaacctaaaaggagtattatttttatatcttttagtggggaagaagaaggcttattgggttctaaatattttgtgtctcatttgccggtagaaaaaaatgccgtgaaagtaatgctgaatatggatatggttggaaggcttaatgaggagaagcaaatttacatgggcggtgcaggaacatttccgaatggagtagaattgatgaagaaattgggtgaaaacagtaccctgaatccggtcatacatgctggtgaagttggaggctcagatcatgtatcattttataaagctgctatttctgctataggatttcatacaggaggccacccgcaatatcatacacccgaagacgatatagatttaataaatattcagggcggtgctttggtatctcaatatatttacaatgctttagtagcaattgcaaatgactcgcaacaactgtattttattaatcaggattagtaattctcgggttagatcctactatacaaacaatctatttacggtagatattctactgatttgtataaatgaaaagtcccaccgaagcaggactaaagattttcatctacggcatatagccttattgtgataagattaaagattagaaattttaatcagttacaaatatatataaaaaggagattaagtggaatatggtaatccgtaattgtgttaattttttttatattatatttcgttcatattaaattttaaaagatatggcgaaaattttaggattggatttagggacaaactcgattgggtgggcgattgttgataaagatggaaatgatttttcccttgtagataagggagtgagaatattttccgagggagtaaaatctgaaaaaggaattgaaagttctcgtgctgcggaacgaactggttatagaagcgcaagaaaaattaaataccgcagaaaattaagaaagtacgaaaccttaaaagttctttcctcaaatggaatgtgtcctttgtcggttgaagaagttgaagactggaaaaaatccgggtttaaaaaatatcctcttaatcctgaatttttgaaatggttacgaacggatgaataccaacatataaacccatactattttagagatagagcaagcaagcaaaaagttgccttatttgaattgggacgtgctttatatcatattgctcaaagaagaggttttttgagtaatcgtctagatcagtcagctgaaggagtttttgaagaacataatcctcaaatccaaagtttgattgaagatttggatgattcgaaattaattcttgatgaattgaaaaattattatgttgataaaggaataattgaagaagctgaaaaaggagtttttaaaaaagatttagatgaaggtgagaaaaaactaaaatcactttataattcgttagtaggaataattaagaagaatgaaaacaacgttgaaaaatgcaaagaggaatttattgcaaggcttaataaaaaagaagatttaggaaaagtaaaaggaaaaatcaaagatatttcgcaagcaatgcttgatggtaattttaaaactttaggacaatattttttcagtctttacaataaaggaaaaataagaaatcaatatacttcgagagaagaacattatttggaagagtttattactatttgtaaaattcagggaatcgaaggaattgatgataaagaaaaattacctgaaaagaagtttacaggcttagccaaagatttgtacaaagccattttctttcagcgtcccttaaaatctcaaaaaggactgattggaaagtgttcctttgagaaaagcaaatcacgttgtgccgtttcgcatcccgattttgaggagtacagaatgtggacttacttaaacactatcaaaattggaacacaaagcgaaaaaacattacgttttttaacgcaagatgaaaaattaaaattagttccaaaattctacagaaaaaatgattttaattttgaagttttagccaaagaacttgttgaaaaaggagcaagtttcgggttttataaatcttccaaaaagaacgattttttttattggtttaattacaaaccaactgattcggttgcagcttgtcaagtttcagcatctttaaaaaatgtgattggtgaagactggaaaacaaaaatatttacttataaaactttaaatgcaaaagaagaagaagtaacaaaatctgttgattataaagacttatggcacttactttccgtagcaacatcggatatttatttggaggaatatgctaaagataaattagggtttgacgacaaaaatgccaaagctttcagtaaaataaaactcaaaaaagatttcgctagtttgagttcatcagcgatcacgaaaattttgccttatgtaaaagaaggacttttgtattctcacgctgtttttatggcaaatattgaaaatattgttgatgaaaatatttggaataatcttgaccaaagaaattatattcagtctaaaatagccgaaattattgagggctatacttttgaaaaaacaggtttggaagtagtcaacagccttattaaagaatataaaacagaaaatgattacagcaaaaaagtatattattcaaaagaagctgaaccagaatttgaaaaagatttaaagcaaaaattagtagttttttataaatcaaatgacattgaagatgaaaatataaaacaagctatttttaatgatttatattcagttttaattgaccaacttaaaaaatatgagtatatcaaaatacaacgattggatgagaaagttttagagtttttaaaaggtgaaaatgaagacggagaagttttttgcaataatccaaagcaattaaaaaagctgtatcatccatcagatattgaaatttttaaaaagcaaaaggtcaaagataaagatggtaaagaaacgggacagcttattttaggtagccctttaacttcttcaatcaaaaatccgatggcaatgcgtgctttgcatcaattgcgtaaagttttaaatactttgattttggaaggtcaggtagatgaaagtacaaggattcatattgaaatggctcgtgagttaaacgatgccaaccgaagaaaaggaattcaggattatcaaaaagagaataaagatttcagagacaatgctattaaagaaatcaaaaaactgtatttggacgaatgtggtaaagaagtagaaccaacggaagatgatattttaagatatcagctttggattgaacaggacaaatgtgagatttacgaacaaggcaagaatattagtatttgtgatataataggaagtaatccagcttatgatatagaacatacaattccaagaagtatttcgcaagataattctcaaatgaataaaacgctatgcagtcagcgatttaacagggatgtcaaaaagcaaaaaatgccaattgaattgagcaatcatttggaaattttgccaagaattgcgcattggaaagaagaagccgacaacttatcaagggaaattgagataattagccgttccataaaagccgcatcgaccaaagaaattaaagataaaaaaatacgaagaagacattatctgactttaaaacgtgattatcttcaagggaaatacgatcgatttatttggaaagagccaaaggttgggttcaaaaacagtcaaattccggatacaggaattatcaccaaatatgcgcaagcttatttaaaatcgtattttaaaagagtagaaagtgtaaaaggcggaatggttgccgagttcagaaaacaatggggaattcaggagagttttattgacgaaaacggatttaaacaatacaaagaaaaagatagaagtaaacacacccatcataccattgatgccattactattgcttgtatgaccaaagacaaatatgatgttttggctaaagcctggacttctgaagatgaacaagataaactaaaggcaaaagctctaatggcagatgccaagccgtggaaaacctttaaagaagatttactcaaaatagaagatgaaattttagtttcacattacacgcccgataatgtaaaaaaacaatctaaaaagattattagggttcgtggcaaaaaacaatttattgcagaaattgagagagatgtcaaaggtaaagcaatacaaaaaaaagatgctaatggaaaagtagtttacaagttaaatgataaaggagaaaagatcccaagattgcagcaaggtgatactattcgaggctcgttacaccaagatagtatttatggagcaattaaaaatccattaaatactgatgaaatacgttatgtgattcgtaaagatttagaaagtctgaaagcaagtgatatcgaaaacattgtggatgaaactgtaaaagagaaagtaaaacaagccgttacaaataaagttttgttgctttcttccaatgcccaacaaaaaaataaaattgccgagaatgaaaaggtttggatgaataaagaaaaacaaatttccattaacaaagttagaatttatgccaattcagttaaaaacccactggaaataaaagagcatagtttattgtcaaaatctcgtcacgaacacaagcaaagagtatatggtcagaatgatgagaattatgcaatggcactttatgagttagatgggaaaagagaatttgaattgattaataattttaatttggctaaactcataaagaatggacaaggattttatcctttaaataaagaaaaagaattaaaaggtaaaaaagttttatatccgattgcaaaaagtaacagcagagatgttgttttgaaacgaggacaacaagttgttttttttgataaagaagttgaaaagccaaaggatatttctgaaatcttggattttaaaagaagggtttatataattgaaggtttgtccattcaaagaataaaatcggggaataatgaatttgaatatggtgtaattatgttaagatatttcaaagaagcaaggaaatcagatgaaatcaaaaaagataattttaaaccagatggtgtttttaaattaggagaaaataaaccaacaagaaaaatgaatcacagccaatttaccgcttttgttgaaggtattgattttaaagttttaccatcaggaaagtttgtcaaaatttgaaaaaaaatattatggatggatcaaaattaacaaaagaacaaatcgcaaaaattcaagcaaaaattgataaagcggaaaaaagcggttttagtaccaaaacaaaagaagagttattagctgacatcaagaaaaaatataatgtttagtttgtacttccttcgtcggatgacaaacaaatgcaaaatgttctttgatataaagtttttcaaactgttaaacatctcaaaccacaactgaaagttcacgtccctgccgggcggatgtcagaactttcagttgtggtttgattaaagattagaaaacacgatattgcagtattatacgttaataggaaccgaaggttgtggtttgattaaagattagaaaacacgatatttagcaatgtataattaagtaagtcagagtggttgtggtttgattaaagattagaaaacacgatatttttatatgcttctatttccaaactcaatacgttgtggtttgattaaagattagaaaacacgatatttaaatgaaaaacacgacaaactacaactcagttgtggtttgattaaagattagaaaacacgatattagatataatgttttgcttattgtctttcaagttgtggtttgattaaagattagaaaacacgatatttttaatctatttctattttcttcaatatgagttgtggtttgattaaagattagaaaacacgatattaatgtggattttgaggaatttgtctctttagttgtggtttgattaaagattagaaaacacgatattacaaatcagaagcattaaacgcagaaacagttgtggtttgattaaagattagaaaacacgatatttcaatttgaaaatgtgggtacgtttattgtgttgtggtttgattaaagattagaaaacacgatattagtaactgaaaaattgaataaagaaaatatgttgtggtttgattaaagattagaaaacacgatatttcatttcacgcacgtataaaggcgcacttagttgtggtttgattaaagattagaaaacacgatattaacaaacaggaagcactaaatgcagaaacagttgtggtttgattaaagattagaaaacacgatattttaaacaaaaacaaataactatgaagtatgttgtggtttgattaaagattagaaaacacgatatttctattactcctgcagctaaaccacataagttgtggtttgattaaagattagaaaacacgatatttacaaatacgcacatcgagaggtggcataagttgtggtttgattaaagattagaaaacacgatattatcttataggtgaaagattcgattcaacaggttgtggtttgattaaagattagaaaacacgatatttctttgtatccaacgttaggggcgacattagttgtggtttgattaaagattagaaaacacgatatttttattcgttacattaacatatgaaactaagttgtggtttgattaaagattagaaaacacgatatttttaaagttttaacgtcgtcagtggtagatgttgtggtttgattaaagattagaaaacacgatattattttccccgttgttactcttgtttccatagttgtggtttgattaaagattagaaaacacgatattagactatgcaaccgtaacagccaattttaggttgtggtttgattaaagattagaaaacacgatattacaaagaaatgaaatcagaatgggaactagttgtggtttgattaaagattagaaaacacgatattaacacaaacgggataggattaaaaatggagttgtggtttgattaaagattagaaaacacgatattttctactactaacataagccaattccaatcgttgtggtttgattaaagattagaaaacacgatattattgtttatacgttcaacttctgatttgttgttgtggtttgattaaagattagaaaacacgatattaacattaacttccactaatacaggtacagggttgtggtttgattaaagattagaaaacacgatattgttaattttattagcaaagaatgttttatagttgtggtttgattaaagattagaaaacacgatattcatgtacaacaaaaaagaaagcagctaatggttgtggtttgattaaagattagaaaacacgatattctacgaactttttactcatagcaagttctgttgtggtttgattaaagattagaaaacacgatattagtttcctcctgggtttataggaggaaaagttgtggtttgattaaagattagaaaacacgatattgaactttataaaacagttcagtaccaagctgttgtggtttgattaaagattagaaaacacgatatttttttcacatttttaaacagtgtttaaatggttgtggtttgattaaagattagaaaacacgatattatttataaacgaaacccctaactcaatagggttgtggtttgattaaagattagaaaacacgatattaaaactgagtaactccaccgctttcacttgttgtggtttgattaaagattagaaaacacgatattcttaatgcagagcttacaacttcgtttaaagttgtggtttgattaaagattagaaaacacgatatttttatagttcaatgtttcgccaccattaacgttgtggtttgattaaagattagaaaacacgatattaatgtctgaaatattagct

SEQ ID NO: 20 - DNA, 8221 bp, Artificial sequence
  CRISPR-Cas Locus 25
agtgtaccgaatacttgatagtgatggaaaacccatcggggttcctattaaagccagtgacttttataataaaccgactcttaaatttttagagcaaaaatttctatccgccggtagtggaagagtatcgatgaaaaacaggataaagaatgccgtggacctggcgcttcttaataaaagcatttcattttccgacctgggaaaactgctcgaaaaagaagggattaatattatttcaagaaaaagtgctgccgggatgatttatggcatcacctatgtggatcatactacaaaatgcgtatttaatggaagcgttttgggcaggcagtacagcgcaaaagcagtacaggaacgctgtaatttaatgggtaaaactctgcggggttccgataacgacataaacataaaatccaaagctgaattaatgggaagtatatcgaataaagatttatttgaaagtagtaaaactgatggctttgatactgctctggctaaagttttggatgtattgacccggatggaatccgcgcaggcttacctgcccaatcagcttaaagcaaaacgcaggaagaaaaaaaggaaagggcagtcagataatcaataaaaaattaatatcatgggaatgcagacaggagaaaatgaacaggcattgagaaagatattggatatgacaaggctcatagggattattattctggtaattcacttttactattattgttattcagccttcaagcagtggcagctggtaagtgagtttaccgataaaattttaggcggtatttatacttgtaattcagtccgatcagctttcttactagttctttttccgtatagatatcccgtgtagtttaatatatttgactaattttattcaaaaatctaaataaggtcctctgcaaaacaatcagataccatacaactattcaaatctgtctttagaggtcgtaatgatgtatttgccgttcgttgggaaaaagctggaaagtctgggtatatgccagcatatcaatatgacctgtataattatcgacaacatacaatgaatggagttatgggatttttttggcgaaccgcctttccttcccgaactttgtttcagaattaagccttatagattttgcaaatctcaaggttatacaaaacagttatttcagtataaaaaaagtcccaccgaagcaggactaaagattttcatctacggcatgtagccttattgtgataagattaaagattagaaattttaatcagtcacaaatatagagaaaaaatattatggtagaaaaaggaaaaccgtaattgtcttaattttttttatagtaaattccgtgcagattaaatttaagaaatatggcaaagattttaggattagatttagggacgaactcgattggttgggcgattgtagataaagacgaaaataatttttcattagtagataaaggagtcagaatattttctgaaggagttaaatctgaaaaaggaattgaaagttctcgtgctgctgaacgaacaggatttagaagtgcaaggaaaattaaatatcgaagaaagctaaggaaatacgaaactttaaaagttctgtcatcaaatggaatgtgtccactttcaattgaagaagtggaagactggaaaaaatcaggttttaaacaatatccacttaatcccgaattcctgaaatggttaagaactgatgaggctgaaaacatcaatccttatttttttagagataaagccagcaaacaaaaagttcctttgtttgaattaggacgagcattctatcatattgctcagagaagaggttttttgagtaatcgtttagatcaatctgcagaaggaattttagaggaacattgccctaaaattgaaacaattgtagaagatttgaattcttatgaagaagttttagaaaatttaaaagattactttttttttgaaactggaattcttgatgctaatgaaaaaagtggttatgcaaaagatttagatgaaggtgataaaaaattggtttctttatacaaatcacttcataccattgtaaaaaagaatgatactaattttgaaaaaggtaaagcagaaattattgaacgactcaacaaaaaagatgttttaggaaaagtaaaaggaaaaattaaagatatttctcaagctatggtcgacggaagttttaagactttagggcaatactttttcagtttatatagcaaagaaaaaattagaaatcaatatacttcaagagaagaacattatctcgaagaattcataactatttgtaaagtccaaggaatcgattccattaacgagaaagaacaattgccagagaagaaatccgatggtttagccaaagatttatacaaagccatattctttcaaagaccattaaaatctcaaaaaggattgattggtaaatgttcttttgaaaagagtaaatcccgctgttccgtttcgcatcctgattttgaagaatacagaatgtggaattacattaatacaattaaaattggaacacaaagcgaaaaaacattgcgatttcttacgcaagaagaaaagttaaaattagttccaaaattctacagaaaaaacgattttaattttgaagttttagccaaagaattaattgaaaaagggacgagctttggattttataaatcttctaaaaagaacgattatttttattggttcaattttaaaccaaccgattcggtttctgcttgtcaggtttctgcatcattaaaaaatattattggagaagattggaaaacaaaaacattcacttaccaaactttaaatgttaaaaaagaagaagttacaaaaacagttgattataaagatttatggcacttactttcagtagcgacttctgatatttatttgaataaatatgcaaaagataaattaggttttgaggataaaaacgcaaaagcattcagtaaaatcaagttaaaaaaagattttggaaatttaagtttgtcggcaattactaaaattctgccttacataaaagaaggattgctctattctcacgctgtttttatggcaaatatagaaaacattgttgatgaggaaatttggaaagatgaacatcaaagaaaatatattcaaacccaaatagcagaaattgttgaaaattatacttttgagaaaagtcaattagaggtaattaatggacttataaaagatagtaaactaaaagaagaatattattctaaagaagcagaatcaatttataaaaaagatttagctactaaattagttttgttttttaaatacaatgttattgaaaatgaatcagaccaaaaaatcatttttgaaaacttatttccaatttttattgagcaattaaaaaaatatgagttcatcaaaatccagagattagatgaaaaagttttagaatttcttaaaggagaaaatcaagatggtgaaatattttgcagcaatccaaaacaattaaaaaaactctatcatccatcggatattgaagtttttaaaaagaaaatcattaaagacgaatttgggaatgaaaaagtagttttaggtactcctttaacatctgctattaaaaacccaatggcaatgagggctttgcatcaattacgtaaagttttaaatactttgattttagaaggtctagtagatgaaaatacactaattcatattgaaatggctcgcgaattaaacgatgctaacaaacgaaaaggaattcaggattatcaaaacgaaaacaaaaagttcagagaagatgcaataaaagaaatcaaaaaactttatttggatgaatgcaaaaaagaagtagaacccacagaagatgatattttaagataccaattgtggattgaacaaaacagacaagagatttacgaacaaggaaaaaatattagtatttgtgatataattggaagtaaccctgcttatgatattgaacatacaattccaagaagccgctctcaagacaattctcagatgaataaaaccttgtgtagtcaacgatttaatagagaaattaaaggaaataaaatgccaattgaattgaataatcatttggaaatcttgccaagaattgcgcattggaaagaagaagccagtaatttatcaagagaaattgaaattataagtcgttccataaaagccgctgcaaccaaagaagtaaaagataaaaaaataagaaggagacattatctaacattaaagcgagattatcttcaaggaaaatatgaccgatttattttggaagaaccaagagttggatttaaaaacagtcaaattcctgatacgggaattattactaaatattctcaggcttacttaaaatcgtattttaaaagagtcgaaagcgtaaaaggcggcatggttgccgaatttagaaagcagtggggaattcaagaaagttttattgacgaaaatggatttaagcattataaaataaaagacagaagcaagcatacacatcacacaattgatgccataacaattgcttgtatgaccaaagataaatatgacgttttggctcacgcttgggcattagaagatgaacaaaataaaaaagaagccaaagctattatagaaaaagctaaaccttggaaaacctttaaagaagatttgttaaaaatcgaagaagaaattttagtctcacattatacacccgacaatgtaaaaaaacaatctaagaaagttattagaattcggggtaaaaaacaacacgttgccgaaattgaaagagatgaaaaaggaaaggcaattcctaaaaaagatgctaacggtaaaattctttacaagttagataaagaaggaaaaaaacttccaagatatcaacaaggcgatgccattagaggttctttgcatcaggatagtatttatggagcaattaaaaaccctttaaatacggaagaaattcgttatgttattcgtaaagatttagaaagtttaaaagcatctgatattgaaaatattgttgatgaaactgtaaaagaaaaaattaaagaagcagttgcaaataaagtcttgttattttcttcaaatgcccaacaaaagaataaaattagagagaatgaaaaggtttggatgaacgaagaaaagcaagttccaataaacaaagttagaatttatgctaattctgtaaaaaatcctttggaggtaaaagaacatagtttattgtcgaaatcacgtcatgagcataaacaaaaggtatatgggcaaaatgatgagaattattgtatggcaatttatgaattagaaggcaaaagggaatttgaattaattaataattttaatttagcaaagttgattaagggaggacaaggattttatcctttttataaagaaaaggaggtaaaaggaaaagtagttcaagttcctattgctaaaaggaatggtagagatttaattttaaaaagagggcaacaagtaattttttatgataaagatgttgaaaatcccgatgatgtttttgatttagtggatttaaaaggaagaatttatattattgaaggattgtcgattcaacgccaagttgtttctggaaagctttatgagtttggtagtattatgtttcgttattttaaggaagccagaaaagcagatgagattaaaaaagatagttttaaacccgatggtacttttaaatcaggagaaataaaaccgactcgtaaaatgaatcataatcaatttaccgcttttgtagaaggaattgattttaaagttttgccatcaggtaagtttattaaaatttaaaaatttattatggatgattcaaaattaacaaaagagcaaattcaatctatccaagcaaaaatggatagagatgaaaaaagtaaacccgtaaagaaatgctaatcgaattttaaaagagataagggttggtttaaaaatttaaaaagttctttgatataaagtttttcaatctcttaaacatccaaaccacaacagaaaattatggcgtccgaccatcagggacgcaagcgggcaagttgtggtttgattaaagattagaaaacacgatatcctacgccaaaatacggttcaacagcttcgggttgtggtttgattaaagattagaaaacacgatatcagtagtcaggaaacgccttaatttcgatacgttgtggtttgattaaagattagaaaacacgatatcttaaaaatcatacttccagagcctacagtagttgtggtttgattaaagattagaaaacacgatatcgattttgcaaaagcataaactcctcctacagttgtggtttgattaaagattagaaaacacgatatcaatggagagcctggaaccttaactcctgaagttgtggtttgattaaagattagaaaacacgatatccgctatatttattttagaaactgaagcaaggttgtggtttgattaaagattagaaaacacgatatcccttctccggtgaacgccagagctgcggcagttgtggtttgattaaagattagaaaacacgatatcatgtatgtatatgtatcacctatcacctatgttgtggtttgattaaagattagaaaacacgatatccaaatcaaaggatatttattacctgatatcgttgtggtttgattaaagattagaaaacacgatatctttttcattattactgagcttaaaacatgggttgtggtttgattaaagattagaaaacacgatatccgatgcagatataaccagccaacaaagctggttgtggtttgattaaagattagaaaacacgatatccacttgttacaatatgcgaatgaggcgttagttgtggtttgattaaagattagaaaacacgatatcaaaattcgttttcattccgcttttagccgtgttgtggtttgattaaagattagaaaacacgatatcccaacggtaaattaatacgtaaaacatcatgttgtggtttgattaaagattagaaaacacgatatcggagcataacgttaatattgtaacgtataagttgtggtttgattaaagattagaaaacacgatatcttatggatatcgcaatcgaggagactattggttgtggtttgattaaagattagaaaacacgatatctttatgccgtttcgttctgccatttcccacgttgtggtttgattaaagattagaaaacacgatatctacaaataagttttaaacgtgcaacttttagttgtggtttgattaaagattagaaaacacgatatctttaccatagtgggagccgggtttcgatacgttgtggtttgattaaagattagaaaacacgatatctaagtctgagacgttaacaaccctgtagagttgtggtttgattaaagattagaaaacacgatatcatttaatatggatgaaatggttactgttaggttgtggtttgattaaagattagaaaacacgatatccgttattttatttaataataaacaaatatagttgtggtttgattaaagattagaaaacacgatatcacaaattgcctaaatataagcctccagcggttgtggtttgattaaagattagaaaacacgatatccaaaactataataaaccacctgagtgtaaagttgtggtttgattaaagattagaaaacacgatatcaattgttgtccaaattgagccgcttgtgttgttgtggtttgattaaagattagaaaacacgatatcggtcaactatttctgaacggatgtgttgatgttgtggtttgattaaagattagaaaacacgatatccaaattacgttaaggagtataaagaccttgttgtggtttgattaaagattagaaaacacgatatcattgagcagtaaacacaaaggaggaaatatgttgtggtttgattaaagattagaaaacacgatatcaaacggagaacaagtaatcacaaaaagtgcgttgtggtttgattaaagattagaaaacacgatatcaaattataattaaacggtagagtacaaatgttgtggtttgattaaagattagaaaacacgatatccagtcaagttctttgctagatagtgtaatagttgtggtttgattaaagattagaaaacacgatatcctatttagacggtaaattcggcacagtagtgttgtggtttgattaaagattagaaaacacgatatcatttgctgtatcgtagcaaatgccttgcgggttgtggtttgattaaagattagaaaacacgatatcaaaataaataccatgaaaccgctttatctagttgtggtttgattaaaga

SEQ ID NO: 21 - DNA, 8221 bp, Artificial sequence
  CRISPR-Cas Locus 26
aaaatagtcatctaattttatgaatggggagacaattaaaaggttttgttctgcttcccaaattatttcataaactgcattttcaagattttttcctgtaataaatttccccatttaattaaattgttttttgcaggttgatattgaaattatcctttattggcataagctttttactgatttcaaaaataggatttttatttcaaaaatagttagagatatttttagttgaatgatactttttgtgtaggcaatgttacagatttggaaggtcatgtttgtgttattagccttctctctgcggttgttttgtttggtattttaaggcagtaatttcgatgatggaagggctgctagtttgttttaatgaataaactattaaatagttagttagttagttagttagttagttagttagttagttagttagttagttagttcttgtgttttttcttcatttcaatcagatttcttttattggagatagatttttttattttgtttttgtttttgttttggccggcgaatggttggttggccggcgaatggttggttggttggttggttggaaaaagagcttatttgaatggaaagatgatttagcgttcttaaactatggtacagcagataatttgcctaggttatgactaatttaaatttattgtatttctgccaccagggtaatttgtgcatcctaaaaaattgtcatatgttcctgctcacttaaccataaagctgctttcgcagctgtagcatatgaattgatcatctaaaatttccaggttcttataggtctgattgcagttaggataatgtgagcatcccaaaaacttgacgctggtattttgattttgtctggtgaccagcttgcctgttttgcagtctgctataggaatagcttttcttgttgaaaacgtagaagtttattaataatttgaataaaaaaagtcccaccgaagcaggactaaagatttttatctacggcatatagccttattgtgataagattaaagattagaaattttaatcagttacaaatatatataaaaagtattatgatagaaaaaggaaaaccgtaattgtcttatttttttttatagtaaattccgtgcagattaaatttaagaaatatggcaaagattttaggattagatttaggaactaactcgataggttgggcattaattgacgataaattaaataaaattttagggattggaagtagaatttttccaatgggggttgaaaatcttggtgatggcgataacgaaatgtctaagaatgcaagtcgaacaggagcaagaggagttcgacgtcagttttttagacgaagactaagaaagaaagtgttactaaaatcactttctgaaaataatatgtgtccaataaacaccaaagattttgaagattggaaacaaactaaacagttccctaatgaaaaattagcaacttggtttgctatgaatccttatgaattgcgtcaaaaagcattgacggaaaaattatctttagaagaaataggtagaattttttatcatctaattcaaagaagaggatttttaagtaatagtagaaaaggaggaagcgatgatggagctatttttaaaggaaatgctaaagaaggaaaaataggaattgattatactttagaaagtatcgaaggaaaaacattgggttcatatttatatgagatttatccaaaagaaaatcagccttttcaatatggactagaaagaatcagaaacagatatacaactcgtagaatgtatattgacgaatttgaaatgatttggaataaacagtcagaatttcattcggttttgaattatgatttaaaaacaattttagggggtagaaaacaagataattacacagaagacggtattttattttatcaaagacctttgcgttctcaaaaacatttagttggaaactgttcttttgagcctttaaaaactaaatgccctataagtgctattcctgtagaaatgtttagaatttggcaatgggttaatacagttgaatataatgggaagaaaatatctgaagaagaaaaaaccaaactagttgagcaattgctttcattcgataaaattgaatttaaaaaactccgaaaagctattgggaaagaaagtgcggagtttaagtttaattacaaagacgatgataaaattgctggtacacatactatctctaatttatccaatagaaaattctttggcaaaagatggtttgatttttcagataaagagcaagaagatatttggcatgttctgtatttttttgatagcaaatcaaacctaaaagaatatgctgttaagaattggaattttagtgaagaacaagcaattgcaatttcaaggtttaatgtaaaagacggctatgctagtttgagtcgaaaagctattggaaatattttgccttttttgcagcaagggtatacttatgatattgcagttgttatgggcggaattaaaaatgcttttggtgacaaatggcaaaatgacacagtagaaaataagctaaaacaactagatttgattgataatattgaaggtatagttaggtctaaaatttcaggaggatttatagatacaattaaggatttattacgtaaagaatttgaatttaatgacaaacaattaaaaaaactttaccatcattctgctgcaattgatacggtagcattattacgaaaactgccaactgggaaacaggcagataaggatattcaagctattagaaatccaattgtaattacagctttattcgaattacgaaaattggtcaatgaattaatcgaagagcatgggcagcttgacgaaataaaagtagaaatggcccgtgacctgaaaatatcaaaatcgcagcgaaataagatacgcaaagatcaaaaacgattggagagagaaaatgacagagtaaaaaaggaagtagaaaagtatgtaagagtttctcatgataacattctaagatttaagctttgggaggaatgcaagcagacttgtccttatacaggtgttgtaattccagtcacaaaactttttacaggggaaatacaaatagagcatatccatccttggagtcgttcgttaaacgatagtttcaataataaaacattgtgctatgcggatgaaaatagacgaaaaggagacaaaacaccttttgaattttatggaagcgatgagctggattggattgctagaaaagaacgtgctttaaaattgttttctgatactaaagagtatcccaatgcctatcaaaaattcaagcgatttgtacagcaaaaatttgacgatgatttttcttcaagacaattaaatgatacacgatttataagtaaagaagcatcgtcttatttaaaacaaatatgtgaaaaggtaaatgtttctccaggtcaaatgacagctaacttacgtcaaaaatggggtttgaatacggttttgaatgatgaaaatgctaaaactcgggaagaccatcgtcatcatgctattgatgctttggttatggcatgtgggaagacaagttatttacaggaattgtcaaaatggaatcgttacaatagaaattatgatttaaaagattttcctatgccttgggaaactttccgatttgatgctgagaaagcaattgataaaatattgatttcgcataaacgtatttctaatgatattacaactcgatatactaaagtggaaaaaaacggaaagacatatataaataagggagttgcagcacgagggcaattgcataaggaaactgtttttggtaaacgaaattttaatggagatgaagcatttcatgttaggaaatcaattgatagtttaacaactgagaaacaattagaaaaagtggttgatgaagttattaaaaaattaattcataagaagattaaggaattgggaggattcgtaaaaggtactatccctgctaatacttttttcaatgttgatgaaaatggagttaaacaaccacaaattttcctgccaaataaaaatggtagtccagttccaattttaaaagtccgaatgaaagaaaatattagtggagctgaaaaattaaaagacaatgtcaatcaatgggtaaaccctagaaataatcatcacgtacttatttataaggatgaaaaaggaattttaagggaagaagtggtgactttctggactgttgttgaaagaaaaagtaaaggatttccagtgtatcaattaccagttgaaggaaaagagatagtgacagctttgcatattaatgatatgtttttgttaggattaaatgaagaagaaatcaattgggagaatccagattatgagattctaagagatagtttatatagagttcaaagtttgtcttcaaaatattatgagtttaggcagtctattaatgcagaatctcaaaataaaatttcacctatttatgaacaaattagaggatttggttcgggtaaaaccggttgggattcttttaatccaataaaagtaaaaatttcagtttcaggaaaaatttcaaaaatataattttactttaaaaaatagtgtaaatgctatcaaatcaaaggagatgaaaagatagagattattaccattataggaagacaagattttgataatagttctttgacataattcaaatcttaaacatccaaaccacaacgaaaaggtatggcattcgcccagcaggaatgcggtgaaagcagttgtggtttgattaaagattagaaaacacgatattcgatgatgatattgttttaggtccataccggttgtggtttgattaaagattagaaaatacgatattcatcatagtatgagttgtaagaagttccagttgtggtttgattaaagattagaaaacacgatattaaaatcctttagcgccttcaatttcaagctgttgtggtttgattaaagattagaaaacacgatattattatattcttataacgatccgattgatatgttgtggtttgattaaagattagaaaacacgatattatgatttcaattgtttaatattgttgggtcgttgtggtttgattaaagattagaaaacacgatattcctttgtcgttgattgtttccaaagactcgttgtggtttgattaaagattagaaaacacgatattccatgttatccgatatattcgatgaaatagttgtggtttgattaaagattagaaaacacgatattcaggacttgttccaaaagcatcatcgctggttgtggtttgattaaagattagaaaacacgatattgggcacagacagctgttaacgctagatatagttgtggtttgattaaagattagaaaacacgatattgacattgtttacctaacactaaagggaaatgttgtggtttgattaaagattagaaaacacgatattacggtgaaagttatgcgaaataatttaggagttgtggtttgattaaagattagaaaacacgatattttggtgaataaagacgatgaatttgaaatggttgtggtttgattaaagattagaaaacacgatattgacttagtaaaagactctacgccattcgcagttgtggtttgattaaagattagaaaacacgatattttgatgatggtaaatgatggatcggggcctgttgtggtttgattaaagattagaaaacacgatattgctctcaacaacttcttcccatttgactagttgtggtttgattaaagattagaaaacacgatattaaagatagaagctatgtgtacaattgcagagttgtggtttgattaaagattagaaaacacgatatttctttataaatttcaatccttgtatccgtgttgtggtttgattaaagattagaaaacacgatattgaagtcaatcggtgtaatttctttctgttcgttgtggtttgattaaagattagaaaacacgatattctaacgcatttctcaacagattaccattaggttgtggtttgattaaagattagaaaacacgatattataactaactttgggtcaaatctaaagacagttgtggtttgattaaagattagaaaacacgatattacatcgtaataagagttatacgaacttccagttgtggtttgattaaagattagaaaacacgatattccaacagcgccaacagcaacagcaggaacgttgtggtttgattaaagattagaaaacacgatattttatttgagttgtcaactcaatgaatttagttgtggtttgattaaagattagaaaacacgatattttaattaatttagtttttcataataatctcgttgtggtttgattaaagattagaaaacacgatattccgaatccagaattaatgagaaaatgcgtgttgtggtttgattaaagattagaaaacacgatattagaatacttggtttaatcgagttatgctaagttgtggtttgattaaagattagaaaacacgatattgatatgtttttagcttttggattgattgctgttgtggtttgattaaagattagaaaacacgatatttccatattcaagaggatattcttttgatccgttgtggtttgattaaagattagaaaacacgatatttaaagctaaaattagtgaaagcaggacttggttgtggtttgattaaagattagaaaacacgatattaaaagagccaataataatgacaaaggaaaagttgtggtttgattaaagattagaaaacacgatatttacaccgaaagcagtaaaaatttagaaactgttgtggtttgattaaagattagaaaacacgatatttaaaaatttaattatgaaagggaattatttgttgtggtttgattaaagattagaaaacacgatattaagtgaactgtttgacttaagaaatgctgtgttgtggtttgattaaagattagaaaacacgatattaaggcaatttagactaattgcgagtccagcgttgtggtttgattaaagattagaaaacacgatatttggtcacctttccaacgcaaatgtttaacagttgtggtttgattaaagattagaaaacacgatattaagacgtttagtattggtgccaagcggattgttgtggtttgattaaagattagaaaacacgatatttctatctgaaatgatgatgacgctttttagttgtggtttgattaaagattagaaaacacgatattaatgcatcagtaagcatatatgatacttctgttgtggtttgattaaagattagaaaacacgatattaaacatatccaagatcattattaaccctatgttgtggtttgattaaagattagaaaacacgatattttgataacaattaaaaagatagattctaaagttgtggtttgattaaagattagaaaacacgatattacggtctaacatcatacaaataactacttagttgtggtttgattaaagattagaaaacacgatattttgaattatttcgtttatcagtccactgtagttgtggtttgattaaagattagaaaacacgatattggtaacataaaaacaaataccatcgttattgttgtggtttgattaaagattagaaaacacgatattcggttcgtttattaacagtttaacaggcaagttgtggtttgattaaagattagaaaacacgatatttttaaaaattgatggaacagttacgcttgcgttgtggtttgattaaagattagaaaacacgatattgagtacagtagctttaggtgcatacaatgcgttgtggtttgattaaagattagaaaacacgatatttgatttttaagattgtttatctcacgttccgttgtggtttgattaaagattagaaaacacgatattaatgcagaaaattcattgagaatgactgcgttgtggtttgattaaagattagaaaacacgatattcgacaacctgagtatctaaaaccaatacttgttgtggtttgattaaagattagaaaacacgatattagttggcttttttccttctgatatataagtctttaggtgtaaatatcgttcagaaaaatgcctcttttatggcctgataacccataattgaggcattttttctattgtagggtttattagataaggtcttgaatgttgaaactttgctaataattataaaagatcagttctagaataattctagttgtgtaggctgaggtgctgatggtaaggctgcttttccccaaaaatttaagatattaccaaattgcttatccgttattcgaagta

SEQ ID NO: 22 - DNA, 5908 bp, Artificial sequence
  CRISPR-Cas Locus 27
acgtgtggtggcattcggcaccttcacctcgaaaggcaaacgacgctcatcagcaatgtgcagcatgagcaggcgaattgcgtcggagatggacaagcccgtcgcttccagcacatcggcggcgcgctccttggtagcgctatcgatgcgagcgcgaacgtaggtatcgacggtgctcatggcgatttccttggagcggttcctataactccatcgtggtcatattgcgcctatatatcaaggtatgtgccagcctgatccatatcttaacggccagagcagtatttcaaagcctctacgcaagctgcgccgattcgctgtctcgccggccgtctttgacggcctgagtcagtagatggcttgcgttgccctccgagctcacataacgcccagcagccgaaacaaagacagtttcgtggcacgacctacagaaaagaaaaacggtcaccgagatgaccgtttgtatcggttggcttcgtaccgaggtacttagccttgttgccgatagtccccaccatcggaatgactgatacgctttaaaagataagtgacttgtatcgacagggcaaggccatggcatacaaattaggaatagatctgggcaccgcgtccattggtgctgtcgccatccgcatcgaaaacaacgaaccacaaagcattgactggcatgcagtacgcatttacagcgaaccagttgtaaacactccgaaagggctgcaacccaaaaaggcggcccgccgtgacgcacggcaattgcgcaaacagattgaaaggcgagcacgacggttgcgccgcattgccaatctgattccattgctgggattgcataaagccgaagtgaaaccggggcgccgtcaggatttgaccacattgcgcgccatcgcagcgcgccagcaggtcgagctaaacgagtttgccctagtactgctgcgtctggccaaacgccgtggttacgccggtggatttcgcgattccaaagacggtgtagtcaagagctccagcgacaaactgagcgaggaaatgagacgtcttgccgagacgcaaaacctgcaggaaataactctgggtgaatacctgctgtacagacaggaacacggactgcctgtctggctcaaagccgaacgtccaggtctggaaccgcgctatgccctgcgcgaaatggtaaccgccgagttcgaacagctctggacaacccaggcccgataccacccgatcctggcctctaatcatctcggcaagccacttaagcaatggttcaatgaagcgctgttctaccagcggccactgaagtctcccgcccacatggtcggcaattgcctgcttgagcccaatctgccacgtgccccacgcgctcacatggcagcccaacacttcagaatcgataaaacgctccatgacatgcgctggggtagtgggcgacgggctgaacgcctgagcaaggcacaactcaacgtgctgcgtcagatgctgaatgatccagccaatgccgatggcaaggtcagcttcaaacacctgtatcaagctttgagcgagacagggttgagcgatccacgaagtcgcactttgaatctggagcgcagcagctgtgatcaactgtccggtaacaacacggttgctcgttggcgtgcgttgggactgtacgaccaatggctgacgctagcccctcgcgaccagacaaccatcatcaacttgctggcggacttgggcgggccggaactgctggttccggacgactggcaccagaacatccgcaagagcagcgccaaagctggcgataccaacctttatcgtcgattccggcccgaggtcgttgatttcatcaatgcgcttcgcgagtgcaaggacaacaatgggcagccagttttcaatcggctgacatctatgaagttcgagggcggacgcagcagctattccgtcaaggccttggaaaaattgaatacctggttcaatgatccttggtggcccgacgaaggctcaggggccgagcgtggtgacgaaatcgatgaagacgcagcactacgggtctgctatccacatctttttacgcagccccaagagctgctccaacgactcgaggccgctccgaccacgggcaacgacgtggttgacggagccttgcgcgaattacgcaaggtcatcaaccaatgcattgacgctttgggtgagaggccagaggaaatcgtcgtcgaaatggcacgagagatcggcaagggcgtcgtttggcggaaagagcaggaaaaccgcatacggcagaatgaactcgcccgaaggaaaattgccagcgaactggaaaagcacggactgagcgccaacaacacccggatactgcgctatcaactctgggaagagcaggatttgcactggtgcccctactgcgcccatcccattaatctggaagcagccacctcgggcatgacacacatagagcacgtcctgccacgctcgctcacccagatcgggcgcaaacgcagcgaactggtgctggcccacgccggttgcaacaacctgaaagccgatcagacaccttggcaagcatttggccatgatgtcgagcgctggtctgcagtagaacgcgctgccgcccgttttcaagagctgggcaagaagtcttacgccaaggaccgcatcaaggcgatgggcttctaccgcaaggcggaacttctcctgctgaaggattacgaaagcgaagtactgagcgacgaatccatagccgacttcgccgaccgccagttacatcagacctcctggatcgccaaggctgcagcccagtggttgcgcaccatcaccccgctggtttccgtctctcgcggtgaattcaccgccctactacgccatcaatggcgactcgacaccgtgatcgcagaagcgcgccttgatgaaaaacttcctgttctggatatcgatgcgtgccccgtatctccggaagcattccagcagttccggaaacaatgggaagggcatccaccagacaacctggccgaacggaccgagcgcaaactggaaaaacgcctcgaccatcgccaccacggcatagatgccttggtcatcgcgctcaccagccgaagcctctacatgtctctggcccggcgctacgttgaagaaagcgaaaggcgcgcccgcggcgagagagtccggcatgattggtccatcgagccgactatgcacaatctgcgcaaccaagcgctgggtatggtccgtacttgcaacctgacccacaagcctgaccgcaacccagccggccgactattcaaggacaccgcctatggcgtccactttccagaggagggcgatcgggtacagctgacgctgcgcaaacctttgaccagcctggccgacgaaaagtctgccgagaagactcgcaagaacctgcacagcattgccagcagtgaggtacgcctactcgttctgaaagcattcgaagcgcgcctcagtgtcgggcagaatccgaaacaggcgctctccgaaccggtaccctaccccgcctatggcaccgcaatctggcgagtccgctgcatgcaaggctacgcggacgatgccgtccgtattgtccataaaagccgtcagggcgaacacgaaaagcacctgctcaacgatggctatgcctgcttggaaataaccgctggggaaaatggcaaacaccaagtacgccttgtcactcagcgtgaagcacaaggccgcggcttcatggataaccggcagcaggcgaaacgcatattcaagggagatacggtgatcgaccggcgcgacgaccgtaaatacctagtgggctacttcaaggccgagggctatattttcctcctcccccacacggacacccgcaacttcgacaagatcaaggaggcggactcgggcaagaagaaagtttccttcaaccaagcgtaccaacttgagcgcatctagccatgtccgagcaccgggtattgctcatcgaacatcaggcctatctgagcatcgacctagggcgtctgtgtatccgccgaccacagcaggagagcgtgttcgtcctgcccgctgacattgccgtgctctgcctgcaccacccggccatcacggtaacggcccacaccctgcagaccctgagccaggaaggtgcgatcgtcttggtgacggacgaccaacatctaccgctggcccaggtctaccccctgctcgcccccatgcgtcagacactgcggctgctccaacagttcgagctgcaagagtcgccgtggcgcggcatcgtctggcaacgcctagtgcaagctcgcctgcggggcgaagccgccgttctgcgcagtttgggcaagaaaggcacgcttttcctagagcgactggccaacaaagtgcaaccgggcgacagcgaccaatgtgaaggccaaggcgcccgccactactggaaacacctgctgcctgagggtttccggcgcagcaagcagggtgccaccgacctgctgaatgctcgcctcaacttcggttatgccgtgctgcgctcgctgatcgcgcgcaacctggcttgtgccggccttaatggttgcttgggcgtcggccactgcaaccagcagaaccccttcaatttagccgatgacttgatagagccttaccgcttccttgtcgaatggcgggtcgcgcggcaactcgaggagcatggggagcaacctttcgatgcggctagccgcaagagcctgttgcagttcatgtccgacaccatccccatgctgctaggggactaccgcctgcctgcagcgatagctgccactgtcgacagctgggtgcagacactcgacgcaattcatgcgcaccggcatccaggtacgataacgctaccggagtatgaacgatggccattaacggatggcgggtcatgtgggtgatcgccgtttacgactgcccgatgaccagcgcagaagcccggcacggctatgcgaaattccgaaagtcactgctgcgggccaacttcatccaactgcagaactcgctctacgtccgccactttccgagcatggcgacggccgaggcttgcattgctcgtttgcggtacgacattcccgaacgggcgcaactggcgttctttcttgtcaccgacaagcagtacgctatgactcgggagtatttcggcgaatgcagcgtacggaaaaagccagaggccccggagcaaatcgagctgttctgaaaaaaagcgcaaccctaacaatgggttgcgtgatcaagaggttatcagtcattccgatggtggggtatcggaacatccgcagctacctgccgcaagacggctggaggttatcagtcattccgatggtggggtatcggaacacacggtgatctttgccgaaccgactggctaggttatcagtcattccgatggtggggtatcggaacattcaggacatccacgaagactacccgggcaggttatcagtcattccgatggtggggtatcggaactgcgcgcctacggcaatgccgtcaactcgcaggttatcagtcattccgatggtggggttatcggaacttggcctgatcgctggtggcaccgaaggaagaaggagtacacatgaagctttgtgcgcggaaaatgctgtaacaaaactcgggtatcgactatgcgaccggatacctagttttgagattttacgtttccatactgactacttatcggttacctgagtgattatttgcttgctatttattcgcttgtttaaacgagcagccagagtagcgctgatagcaataccttttctcgaactcgatagtcggttaaaaaccctcaagacattgattacattaaaaattattaaaacagccacaaacagactcgcgaagaccttgccttataaacaagtcactaagtcaaccaagaatacttagcgacttaatttttgagggttttcgatgcgagttattctcacttagaaagttttcgtttttttag

SEQ ID NO: 23 - DNA, 6265 bp, Artificial sequence
  CRISPR-Cas Locus 28
catgtgacgtgtagaagtatatccaaatcactcccgatttcctcagcccattggcactgcctgaacactctgtatggagccgcgagggtaagcaggcgttgcgctgggggaatgttcactgcgcgctggaagcggtcgaagaataccctggtcatttcaaacaaggccagactcggtttaagggtacggaccttggttagtgacagctgtcaaaagtcgacttcatagtcgccttcggcaatcctaatgatggctattataaatttcgaaaccagtctcttttttgcaaaccgtgttgcttcgacggtgcacggcggccaaaactgacacccaaaaaacaaaaacggccaccgaggtggccgtttgtatcggttggcttcgtaccgaagtactcagccttgttgccgatagtccccaccatcggaataactgatacgctttttgaagataaagcacttcaggtgacagggcaagataatggcatacaaattaggtatcgatctgggcaccgcttccatcggtgcggttgccattcgtattgaaaataaggtgcctatcagcgttgactggcatgcagtgcgcattttcagcgagcccgtcgtaaacactcagaaagggctcacgcccaaaaagacggcccgtcgtgaagcccggcaattgcgtaaacaggtcgaacgacgagcccgacggttgcgccgtattgccaatctgattccattgctggggttgcagaaagccgaagtaaagcttgggcgccgtcaggacttgaccacgttgcgagctattgccgcgcgcgagaaggtcgaactacatgagtttgccctggtactgctgcgtattgccaaacgccgcggttacgccggtggatttcgcgattccgaaggcggcgtggtcaagactgccagtgacaaactgagcgtggaaatgagagctcttgccgagacgcgaggcctgcaacagataactctgggcgaatacttactgcatcgacagcaacgagggctgcctatctggctcaaagctgagcgtccaggcttggaaccgctctatgctctgcgggagatggtaaccgccgaattcgaacaaatctggacaatccaagccaaatgccatccgatcctgaacagctgtcatctcgaaaaaccacttaagcaatggttctatcaagcactgttctatcagcgaccactgaaatctcccgcccacatggtcggcaattgcctgcttgaacccaatttgccacgcgccccacgcgctcaaatggcagcccaacgcttcaggatagaaaaaacgcttcacgatttacgctggggtggcggacgacaggctgaacgcctgaacacagcgcaactcgacctactgcgtcagactctgagcgatccaaccaatgttgatagcaaggtcagctttaagcgcctgtaccaagccctgaacgaggctgggttgaacgatccgcgaaatcgcacattaaacctggagcgcagcagtcgcgatcagttacttggcaatagcaccgttgcccgttggcgcgcgctgggcctgcaagatcaatggctgatgctggctcctcgcgaccagacatctgttatcaacctgctggcagacttgggtggtccggaaatactgaccccagacgactggcaccagaacatccgtaaaagcagtgccaaggacgacaacaccaaagcctatcgtcgattccggcaggaagttattgatttcatcgatgcgcttcgccggtgcatagatagtaatggccagccggttttcaatcgtctttccgctatgaagttcgacggcggacgcagtagctactcggtaaaggccttggaaaagatgaacgaatggttcaataacccgtggtggcccaatgaaggtccaggctcagagcgtcgcggcgagatcgacgaagaagtggcgatacgggtgtgttacccacatctttatacgcaatctcaagagctgcacccgcgactcgaagccgctccgaccaccggcaacgacgttgtcgatggagcattacgcgaactgcgcaaggtcatcaaccaatgcattgacgagcaaggtgagaaaccacaggaaatcatcatcgaattggcaagagaggtcgggaaaggtgtggctttgcggaatgaacaggaaagtcgcattcggaacaacgaactcgccaggcggaaaattgccagcgaacttgaagggcacggtttgattgccagcagcacccggatactgcgatatcaactctgggaggagcaagagcgacactggtgtccttattgcgcacttcccatcagcctggaagcagccatctcaaacatgacgcacatagaacacgtcctgccccgttcgctcacccaagtcggtcgaaaacgcagtgaactggtgctagcccatgctggttgcaatcatctgaaagccgaccagacgccttggcaagccttcggccacgatgccgagcgctggtctgcagtagaacgtgctgccgcccgatttcaggagctgggtaaaaagtgctatttcaaagacagggcgaaggcgatgggttgcttccgaaaatcagcccttctcatgctgaaggattatgaaagtgaagtattaaacgacgaatccatagccggattcgccaaccgtcagttacaccagacatcttggattgccaaggttgcagcccaatggttacgtacgatttcaccgctgatatccgtttcccgcggcgaattcaccgccctgctgcgccatcaatggcgactagacaccgttatcgcagaaacgcgctatggtgaaaaacttcccgttctggatatcgatggcaatcccgtccatccggaagaatttcagcacttccggaaacaatgggaaggacatccaccggacaaccccgccgaaagaaccgagcgcaaactggaaaagcgcttcgaccaccgccaccatggcattgatgccctggtcatcgcgctcaccagccgtagtttgtacatgtctcttgctcggcgctatgtagaagaaagcaaaaagcgcgcccgcggcgagaaagtccggcgtgactggtccattgagccacctatgcacaatttgcgcggccaagctctggatatgatccgcgcgtgcaacctgaccctcaagcccgaccgcaacgctgccggccgactgtttgaggactacgcctatggcgtccacttttctgacgcaagcgagcgggcacagcttacgcggcgcaaaacattgatagatcttgcagacgaaaagtccgcagagaagactcgcaaaaatctccagagcatcgcaagccctgaggtacgccagatcgttgtggaagcgctccaaatgcgcctaagtgccgggcaaaatccgaaacaggcgctctccaaacccgtactctaccccgcttacggtacagaaatttggagggtccgttgcttacaaggctacgcggaccatgccgtgcgaatcgttcacaatagccgccagggtgaacacgaaaagtgtctgctcaacgatggctatgcctgcctggagataagggccggggaaaatggcaaacaccaagcacgtctcgtcactcagcgggaagcacagggtcgtgacttcatggaaacccagcagcaggcgaagcgcctattcaagggagatacggtgatcgacaggcgcgatgatcgtaaataccgagtgggttatttcaccgccgagggcaatattttcctcatccccttcgaggacactcgtaatttcgataaaatcaatgagcggaactcgggcaagaaaaaggtttccttcaaccaagcgcatcgacttgagcgagtatgacgatgtccgagcacagagtactgctcattgaacatcaagcctatctgagtattaatctagggcgcctgtgcatccgccgaccacagcaggagaacgtatatgtcctgccctcggacattgctgtgctctgcttgcaccatccggctataacgttaacggcccagacattgcagatcctgagccaagaaggcgctatcgttttggcaaccgacgataaacatcaaccacttgcacaggtctaccccctcctcgcccccatgcgtcaaacactgagactgctgcaacaattcaaactgcaagagtcgccatggcggggcatcctctggcaacgattagtgcaagcccgcctacggggagaagccgccgttctgcgcagcttgggtaagaaaggcgctctatttcttgaacgactggccatcagggtactcccgggcgacagctgccaatgtgaaagccaaggtgcccgtcactactggaagcacctgctgcctgagggttttcatcgcagcaagcagggggctatcgatccgcttaatgtccgcctcaacttcggctatgccgttctgcgttcactgatcactcgcaacttggcttgtgctggcctgaatggttgcttgggcgtgggtcactgtaaccaacagaaccccttcaatctggccgatgacctgattgaaccttaccgcttcctcgttgaatggcgggtggcacgccaactcggtgagaatgctcagctaccattcgatgcatcgactcgcaagcaactgctgcaattcatgtccgacgccgtccccatgccgcgaggggactaccgtctgcctgcagcaatagaggccacagtcgacagttgggtacaaacactcgacgcaattcatgccaaccggaatccaggcacgataacgctaccggagtatgatcgatggccattaacggatggcgggtcatgtgggtgatcgccgtttacgactgcccaatgacaagcccagaagcgcggcacgactatgcgattttccgaaagtcactgctgcgggccaactttatccagctgcagaactcgctctacgtccgtcactttccgagcatagcaacagccgacgcttgcatttctcgtctgcgtttaaatattcccgatcgtgcgcagctagcattctttcttgtcaccgataagcagtacgcaatgactcaggagtattttggtgaacgcagcgttcggaaaaaaccagaagccccagagcaaatcgagctgttctgaacaaaaaaacgcaaccctggcaagaggttgcgtaattaagaggttatcagtcattccgatggtggggtatcggaacgctgcggcaaagataacttcgctgtcataaaaggttatcagtcattccgatggtggggtatcggaacacggccatggtgggtccgatacgctttagcaggttatcagtcattccgatggtggggtatcggaaccgcgcatctacagcaccgacgacgggttccaggttatcagtcattccgatggtggggtatcggaactggtcattaccccggaagccggcgagcaggaggttatcagtcattccgatggtggggtatcggaacattcagcagtacattaaaaccggccaacacaggttatcagtcattccgatggtggggtatcggaactaatcatgggcggcggtggcggcggtggcgaggttatcagtcattccgatggtggggtatcggaacgagcgaatgcagcggtcgcgggtgcggatgaggttatcagtcattccgatggtggggtatcggaactgccaccgtggcgcctgtcgttcgacccgtaggttatcagtcattccgatggtggggtatcggaacgtagccgggcacgtcctgccgggcttcgggaggttatcagtcattccgatggtggggtatcggaacacacggtgcagaccaaaacgtggcccgccaaggttatcagtcattccgatggtggggtatcggaacaatggcagaccgggcggcgcgcgctattttaggttatcagtcattccgatggtggggtatcggaacatcgttaacgacgacctcggcgttttcgataggttatcagtcattccgatagtggggtatcggaacaacgcagagaccagcgagcagcgtattcgcaggttatcagtcattccgatggcggggtatcgaaacaccaaaatgtacgacctgaaaacattaggtcatggaaacatcaagcactcccagcatcacctcttgatagacttactctctgagctagaacaaccctcctaactcagccggtttccaattcataattaccagttccccgctcacatcagcctttccctgccgctggttggtggcgctgtaacggatatccagtcgctcgaagtgaaaaccttcgaacactcggcgaatgtcggggtgatcattgatgctgaccatcaccctgcccttgcagcggcgc

SEQ ID NO: 24 - DNA, 3282 bp, Bacillus cereus
atggcatacacaatgggaatagatgtggggattgcttcgtgtggatgggctattgtagatcttgaaagacaacgaataatagatctaggtgttcggacttttgagaaagcagagaatccgaaaaatggagaggctcttgctgtaccaaggagagaagctagatcgagccgtaggagattacggagaaaaaaacatcgcattgaaagattaaagcatatgtttattcggaatggactggcggttgatattcaacatcttgagcagcagacgttacgtagccaaaatgaaatagatgtatggcaattacgagtagatggtttggatcgaatgctaactcaaaaagagtggcttcgtgtattaattcatcttgcacaacgtcgtggttttcaatcaaatcgaaaaacagatggttcaagtgaagatgggcaggttcttgtaaatgtaacggagaatgacagattaatggaagagaaagattatcgaaccgtagcggaaatgatggtaaaagatgaaaaattctctgaccataagcgaaataaaaatggaaattatcatggagtagtgagcagagcttctttattagttgaaatacatacattatttgaatcccaaagacagcaccataattttttggcatcgaaagatttcgagctggaatatgttaatatttggtcttcacaacggcctgttgcaacaaaagatcaaatagaaaaaatgattggtacatgtactttcttaccgaaagaaaagagaactccaaaggcatcttggcattttcaatattttatgctcttgcaaacgatcaatcatatccgtataacaaatatacaaggcacgagatcattgaataaagaagaaattgaacaagtggtcaatatggcacttaccaaatcaaaggtatcttaccatgatattagaaaagtccttgatttatcagaagaatatcaatttgttggcttggattatggaaaagagaatgaaaaaaagaaagttgaaagtaaggaaacgatcatcaaattagatgattaccataagttaaataaaatttttaatgaagtggaattagctaaaggagaagcttggaaagctgttgattatgatacagtagcgtatgctctcactttctttaaagatgatgaagatattagagattatttgcaaaataaatataaagatagtaaaaatcgtcttgttaagaacgtagctaataaagaatacacaaatgaattggtagaaaaagtgagtacgctatcttttcgtaaagtggggcatttatcattgaaagccttacgaaagatcatcccgtttttggagcaaggcatgacctatgataaagcgtgccaagcggctggttttaactttcaaggtatatcaaaaaagaagagatctgttgtcttgccggtcattgaccaaatttccaacccagtagtaaatcgtgctcttactcaaacgcgtaaagtaattaatgctctaatcaaaaaatatggttcacctgaaaccatacacattgaaacagcaagagagttatcaaagagatttgatgaacgaaagaatattactaaggattataaggagaatagagacaagaacgaacgtgcaaaaaaacacttatcggaattagggattattaatcctactggtcttgatatagtaaagtacaagctgtggtgtgagcaacaagggcgctgtatgtacagcaaccaacccatctcctttgaaagactgagagaatcaggttataccgaggtagatcacattattccatacagccgaagtatgaatgatagttataacaatcgcgtattggttatgactagggaaaatcgtgaaaagagtaatcaaactccttatgaatatatgggtaatgatacgcaaagatgggatgagtttgaacaaagagtcacaacaaatccacaaataaaaaaggagaaacgacagaacctcttgctaaaaggattcactaatcgtcgggaattagaaatgttagaaagaaacttaaatgatacacgttatataactaagtatctttcacattttattagtacgaatttggaattctctcctagtgataaaaagaaaaaggtagttaatacaagcggtcgtatcacttcccatttaagaagtagatggggattagaaaaaaatcgtgagcaaaatgatttacaccatgcaatggacgcggttgtaattgctgtcacctcagactcgtttattcaacaggtaacgaactactataaacggaaagaaagaagagagttgaatagggatgataagttccctctaccttggaagttttttagagaagaagtcatagcaagattaagccctaatccaaaagaacaaattgaagcattgcccaaccatttttatagcgaagatgaacttgctgatcttcaaccgatttttgtgtcaagaatgcccaagcgtagtataactggagaggcgcatcaggcacagtttcgccgagttgtgggtaaaacgaaagagggtaaaaatattactgcaaagaaaactgctttagttgatattagctatgataaaaatggtgattttaatatgtatggaagagaaacagatcctgctacttatgaagcaattaaagaaagatatctcgaatttggaggaaatgctaaaaaagcattttcaacggatttacataaaccgaaaaaagatggcaccaaagggccactgataaaatctgtgagaataatggaaaataaaacattggtacatcccgtaaataaaggaaaaggtgttgtgtataacagctctattgtaaggacagatgtatttcaaagaaaagagaaatattatttactacctgtgtacgtaacagatgtaaccaaagggaaactaccaaataaggtgattgttgctaaaaagggatacgatgattggattgaggttgatgatagcttcacatttttatacagtctatatccgaatgatttaatattcatcagacaaaatccaaaaaagaaaatatcattaaaaaaacgtattgagagtcattctatttctgatagtaaagaggttcaagaaattcttgcctattataaaggggttgatagttcaactgctgctatagagtttattactcatgatggtagttactatgcaaaaggtgttggtgtccaaaatctagattgttttgaaaaatatcaagttgatactctgggtaattattccaaagtgaaaggagaaaaacgacttgagttggagacatctgataataacgacaaaggcaaagatgtcaattcgattaaatcaactagtcgttaa

SEQ ID NO: 25 - DNA, 3279 bp, Brevibacillus laterosporus
atggcttacacaatgggactagatgtggggattgcttcgtgtggatgggctattgtagatattgaaagacaacgaataatagatgtaggtgttcgaatttttgagaaagcagagaatccgaaaaatggagaggctcttgctgtacctaggagagaagctagatcgagccgtaggagattacggagaaaaaaacatcgcattgaaagattgaagcatatgtttattcgtaatagactggcggttgatattcagcatcttgagcagacgttacgtagtcaaaatgaaatagatgtatggcaattacgagtagatggtttggatcgagtgttaactcaaaaagagtggcttcgtgtattaattcatcttgcacaacgtcgtggttttcaatccaatcgaaaaacagatggtttaaatgaagatggacaggttctcgtaaatgtatctgagaatgagagattaatggaaaagaaagattatcgaaccgtagcggaaatgatggtaaaagatggaaaattttccgaccataagcgaaataaaaatggaaattatcatggagtagtgagcagagcttctatattagttgaaatacatgcattatttgaatcccaaagacagcaccataatttttttgcatcgaaagatttcgagctggaatatgttaatatttggtcttcacaacggcctgttgcaacaaaagatcaaatagaaaaaatgattggtacatgtactttcttaccgaaagaaaagagagctccaaaggcatcttggcattttcaatattttatgcttttgcaaacgatcaatcatatccgtataacgtatttacaagtcacgagatcattgaataaagaagaaattgaacaagtggtcaatatggcacttaccaaatcaaaggtttcttaccatgatattagaaaaatccttgatttatcagaagagtatcaatttgttggcttggattatggaaaagaggatgaaaaaaagaaagttgaaagtaaggaaacgatcatcaaattagatgattaccataagctaaataagatttttaatgaagtggaatttgctaaaggagaaacttgggaagctgttgattatgatacagtagcgtatgccctcactttctttaaagatgatgaagacattagagattatttgcaaaataaatataaagatagtaaaaatcggcttgttaagaacttagctaataaagaatacacaaatgaattgatagaaaaagtgagtacgctatcttttcgtaaagtgggtcatttatcattgaaagccttacgaaagatcatcccgtttttggaacaaggtatgacgtatgataaagcgtgccaagcggctggttttgactttcaaggtatatcaaaaaagaagagatatgtcgtcttgccagtcattgaccaaatttccaacccagtagtaaatcgtgctcttactcaaacacgtaaagtaattaatgctctaatcaaaaaatatggttcacctgaaaccatacacattgaaacagcaagagagttatcaaagacatttgatgaacgaaagaatattaccaaggattataaggagaatagagacaagaacgaacatgcaaagaaacacttatctgaattggggattattaatcctactggtcttgatatagtaaagtacaagttgtggtgtgagcaacaagggcgctgtatgtacagcaatcgacctatctcctttgaaagactgaaagaatcaggttataccgaggtagatcacattattccatacagccgaagtatgaatgatagttataacaatcgcgtattggttatgactagagaaaatcgtgaaaagggtaatcaaactccttttgaatatatgggtaatgatactcaaagatggtatgagtttgaacagagggtcacaacaaatccacaaataaaaaaggagaaacgacagaacctcttgctaaaaggattcactaatcgtcgggaactcgaaatgttagaaagaaacttaaatgatacacgttatataactaagtatctttcacattttattagtacgaatttggaattctctcctagtgataaaaagaaaaaggttgttaatacaagcggtcgtatcacttcccatttaagaagtagatggggattagaaaaaaatcgtgagcaaaatgatctacaccacgcaatggatgcggttgtaattgctgtcacctcagactcgtttattcagcaggtaacgaattactataaacggaaagaaagaagagagttgaatggggatgataagttccctctaccttggaagttttttagagaagaagtcatagcaagattaagccctaacccaaaagaacaaattgaagcattgcccaaccatttttatagcgaagatgaacttgctgatcttcaaccgatttttgtgtcaagaatgcccaagcgtagtataactggagaggcgcatcaggcacagtttcgtcgagttgtgggtagaacgaaagagggtaaaaatattactgcaaagaaaactgcgttagttgatattggctatgataaaaatggtgattttaatatgtatggaaaagaaacagatcctgctacttatgaagcaattaaacaaagatatctcgaatttggaggaaatgctaaaaaagctttttcgatggatttacataaaccgaaaaaagatggcgccaacggtccactgataaaatctgtgagaataatggacaataaaacattggtacatcctgtaaataagggaaaaggcgttgtgtataacagctctattgtaaggacagatgtatatcaaagaaaagagaaatattatttgttacctgtgtatgtaacagatgtaaccaaggcgaaactaccaaataaggtgatcgttgccaaaaagggatacgatgattggattgaggttgatgatagcttcacatttttatttagtctatatccgaatgatttaatattcgtcagacaaaatcaaaaaaagaaaatatcattaaaaaaacgtattgagagtcattttatttctgatagtaagaaggttcaagaaattctcgcatattataaaggggttgatagtgcatctgctactatagagtttattactcatgatggtagttactatgcaaaaagtgttggtgtccaaaatctagattgttttgaaaaatatcaagttgatattctgggcgattattccaaagtgaaaggagagaaacgacttgagttggagacatctgatagtaaccacaaaggcaaagatgtcaattcgattaaatcaactagtcgttaa

SEQ ID NO: 26 - DNA, 3213 bp, Artificial sequence
  Cas endonuclease of Locus 8 (Cas-Locus 8)
atgagagagttggattatcgcatcggattagatattggaacgaattctattggctggggtgttattgaattatcttggaacaaagatagagaacaatatgagaaagcgagaattgtcgacaagggtgttcgtatgtttgataaggctgaaatacctaagactggtgcttctcttgctgaaccgaggcgtatagcgcgctcatcacgtagaaggttaaatcgcaaaagccagagaaaaaaagatatacgtaatttacttgttcaacatgaaattattagccaaaaagaattagcttcgttatatcctctgtcaaaaagttcaatggatatttgggatattcgtttggatggattagatcgcttgttagaccgttttgaatgggctcgactattaattcatttagcacaaaaacgcggttttaaatcaaatcgaaagtctgaactgaaagatgtggagacaggaaaagtattatcaagtattcaagcaaatgaaaaacgattatctctgtaccgtacagtgggagagatgtggatgaagaatatggattttagtaaatatggcaaaaggcgtaattctcctaatgagtatgtattttcggttagccgtgcagatttagaaaaggaaattgtgactctatttgaagcgcaaagaaaatttcattcatcatatgcatcggttgatttacaaaaaacatatttacgaatttgggcacaccaactcccttttgcttctgggaatgcaattgtaaataaagtaggatattgttcattattaaaaggtaaagaaaagagagttccgaaagcaacatatacttttcaatatttcaatacactagatcaaataaaccgaacacgattagggcctgatttccaaccatttacgaaggaacagagagacattattttagataaaatgtttcaacggacagattattataaaaaaaagacaatacccgaagttacttactatgatattcggaaatggttagcactagatgaaacaattcaatttaaaggacttacctatgacccaaacgaagagctgaaaaaaatagaattgaaaccctttattaatttaaagccattttatgaaattaaaaaggtagttactaattacgcccaaaaaacaaatgaggtattctcaacattagactatgatacagttgcatatgctttaacagtttataaaacggacaaagatattagatcttatttgaagagatctaataatttatcaaaacgttgctatgatgatcaattaatagaagagctattaactctctcctatacaaagtttggtcatttatcatttaaagcaattaatcatgtactgccaattatgcaagagggaaggacttatcaggaagcaataaaccaattaggatatgataccactaatcttaaaaaagaaaacagaagtatgttcttgcctcttattccagatgagataacaaatccaattgttaaaagagcgctaactcaagcacgtaaagttgtaaatgctattattagaagatatggttctccaaattctgttcatattgaactagctcgtgagctttctaaaagtcatgacgagagaaagaaaataatgacagctcatgatgaaaattataagaaaaataaaggagctatatcaattttgatcgagaatggaattttaaatccgacaggatatgatattgtgcgttataagttatggaaagagcaaggagaacgatgtgcttattcgttaaaaaagattcctgctaatacgttttttaatgaattgaaaaaagagcgaagtggccctccggttctagaggtagatcacattttaccgtatagtcagagttttattgatagttaccataataaagtattagtttatggggatgagaatcaaaaaaagggaaatcgaattccatatacttttttttcagaagaaaataaggagtgggaaagctttgaaagctacgtaagatcgaatagttttttttctaaaaagaagcgcggatatttattgaaaaaagcttacttgccaagagagagtaacctgattaaggagcgtcatttaaatgatacccgatatgctagtagctatttgaaaaatttcattgagaaaaatttaaaatttaaagaagctgaaggtattacacgaaaaaaacatgtacagacggttaacggtgtaattacagcccatctgcgaaaaagatggggcttagaaaaagataggcaggaaacatatttgcatcatgcaatggacgctattattgttgcttgtacagatcatcatatggtcactaaagtaacggagtactatcaaataaaagaaagtaataagtcaataaagaaaccgtattttcctttgccatggatgggctttagagaggaaattttatcacatttagaaagtcagccaattgctagaaaaattagtgaggaacttaaaattggatatcaatcatctgattatatacttgtatcgcgaatgccaaaaagatctgtcactggatcagctcatgaccagacagtcatgaaaaaaggcggtatcgataaaaaaggaaagactattatcataaagcgtgtgcacttaaaggatattaagtttgatgagaatggcgattttaaaatggttggaaaagaacaagatttagcaacttacgaagcgataaagcaaagatatttagagtatggaaaagaatcgaaaaaagcatttgaaacacctttatacaagcctagtaaaaaaggaaaaggaaacctcattaaaaaaattaaagtagaagtgcaaaccaaatcttttgttcgagaagttaatgggggcgtagctcaaaatggtgatttagtaagaatagatctgtttgaaaaggataataggtattatatggtacctatttacgtagtagatactgttcgttccgaactaccaaataaagctgtaaaaagcagtaaaggctatgagcaatggctaacaatagataacagctttacgttcaaattcagtttatattcttatgatttagtacgacttgtaaaaggtgatgaagatcgtttcctatactttagtactcttgatattaattcggaccgtcttaattttaaagatgtaaataagccatcaaagcaggctgaatatcgttatagtcttaaaacaattgagaatttagaaaaatatgaggttggtgttttaggtgatttaaggttagtgagacaagaaacacgtaaaattttttaa

SEQ ID NO: 27 - DNA, 3246 bp, Bacillus cereus
ttgaaatacgtattaggattggatattggaatcgcatcttgtggttgggctgtaataaatcaagaaaaacatagaattgaagatttaggggtacgtatttttgataaagctgagcaccctaaagatggaaaatccttagcagcaccaagacgtgaatctcgctctactaggaaaacacttcgtcgtaaaaaacatagaatgcaacgtatcaaagtacttttagttaagtatggtttattatctacgactgagattgaaaatttatatgaaagtgctagtgaaattgatgtttggaacctacgtttagatgctctagaacgcaagttaaatcaaaaggaatttgcaagagtccttattcaccttgctaaaagaagaggatttaaatctaacatgaaagaaacaattctctcagaaaacggacaaatcttagaaagtatttcagaaaatcaaaagattatggagcaacaaaattatagaactgttggagaaatgattgtaaaagataacaagtttgaaaaccataaaagaaacaaagatggtacttatatcgggactgttactcgtcaacaacttcaagatgaaatacatatgattttcaatgcacaacgtttgtttataaatgaccttgcaacagaggaatttgaaagtagctacttagaaatttgggcatctcaacgtccctatgcttctaaagatcaaattgaaaaaatgattggttactgtaccttagaaccaaaagaaaaaagagtccctaaagcttcatggtcatttcaatattttgtagcgctacaaaccataaacaacctacgactgattagtaaagacaggatagaagaactctcttttgaagaaaagaaacaaattatgaatctagcacttgaaaaacctattgttaaatacattgatatccgaaaattattatccatttctaatgaacttcattttaacaatctattatattcagctgatacagtagatacaacggtggaaaataaaaaatgtatagaactcaaagaatatcactctattaataaggtatataaacaaatttatggaaagaacgccttaaatttattacctatagattacgatacaattgcatacggactaactatcttcaaagacgataaagatatcctagaatacttacaaaataaatatataaatacaaaaggaaaaactataagtaatttaacaaaaaagacatacgatgacacgtttattcaagcattattgactttgaacttcacaaaaatgggacatttatcatttaaagccttaaaaaatatcattccttttttagaagagggaatgtcatatgataaagcttgtgataaggcaggatataactttaagggaacatcatttacaaaaaaaacaaagtacttgcctgttattccacagaatacaaatcctgttgtacatcgtgctctttcacaaacaagaaaggtcataaatgcaattataaataaatacggttctccagtttcaattcatattgaaaccgcaagagagttatctaaaacattccaggaaagaaaagaaatagatagcatgtaccaggataactccaaaaagaatgaacacgccattaataagctaaaagaattaggtaacattaatccctcgggaataaatattgtcaaatttaagctttggaaggaacaagacggtagatgtatgtattccggagaatatattgaaccacatcgattatttgaagagggatataccgaagtagatcacatactaccctatagtcgtagtttagatgacagctataacaataaaacattagctttaggaatagaaaatcaacgaaaagggaacaaaactccttatgagtacatggggaacacctcaatttggtacaaatttgaaacgagggtacagtcgaataaaaaaattaacaaaaagaaacaacaaaaattgcttctacaatacttttcgcatgcaagagagcaagaatttatagagcgaaatctaaatgatacccgttacgccacaatatatatatcagcgtttattcaacaacacctcattttctctgaaagcttcagtaaaaaaagagttcatacagttagcggaattataacatctcatgtacgtagtagatggggatttaacaaggatcgtaaagaaagtcatatccatcacgcattagatgcagtgattgttgctgtcacatctgatcaaatgattcaaagagtaacaaattactataaactaaaagaattaaatagaaagcttcaagccaaagggatactgtttcccgaaccttgggaggggtttcgtttagaattagaagcaagaatttctccaaatacccagcaatatttaaagggaatttgttctaaaaattacgccgatatcaatctatccgaaatcaagcctatctttgtttcaagaatgcctaagcgatctattactggtgaattacatcaagagacaattcgaaaatttattggttataacgaaaaagggaaagtattaaccgcaataaaaacaaagttagaagatattccttttgatgccaatggtgattttcctatgtatggaaaagaaactgatttgtatacgtataatgccatcaaagaacgttatttaagtcataaaaaagataaacgtaaatcatttcaagaatccttatacaaacccacaaaaacaggagaaattgggccacttataaaatccattaaaataattgatacaagaaccattgtcaatcctgttaaccaaggtaaaggtgtcgtatataatagtaaaattgctcgtactgatgtattcaaaaaagatgataagtactatttaattcccatttatacaattgaccttatgaaaaatgttttacctcaaaaagcaattacagcaggaaaaggatatgaagattggataaccattgatcatagctttacttttttatttagcctttttcctaatgacctaataaaaattgtcccctcaaaaaataaagaaattaaagctaggtcaacttcatcaaaaaaagaaatattactaccatcactcacaggatattttaagaaggttcatagtggaacagcaggcattactgttgaatcccacgatggtaggtttatagcagatataggctcaaagcaattattattatttgaaaaacaccaggtagatgtactgggacattacacaaaaataaaggaggaaaaacgtattgggatgtcgacatgtaatgataacaaaaagagctcagctttcggttcgctataa

SEQ ID NO: 28 - DNA, 4137 bp, Lactobacillus fermentum
gtgaaagagtatcacattggcttggacattgggacaagctcaattggctgggcggtaacggatagccaatttaaactgatgcgtatcaaggggaagacggcaatcggggtgcggttgtttgaagaagggaagacggctgcagaacgtcgaaccttccggacaacgcggcggcggttgaagcggcgaaaatggcgcttgcactacttagataaaatttttgccccgcacttacaagaagtggatgaaaatttcttacgccgtctgaagcaatcaaatatccacccggaagatccagcgaagaatcaagccttcattggtaagctcttatttccggatctactgaagaagaatgaacgtggttacccaacactgattaagatgcgcgatgaattgccagttgagcaacgcgcccactacccagtaacgaacatctacaagttacgggaggccatgattaacgaagatcgccaattcgatctgcgggaagtttacctggccgttcaccacatcgtgaagtaccggggtcacttcttaaataacgctagcgttgataagttcaaagtggggagaatcgattttgacaaatcctttaacgttttgaacgaagcctacgaggagcttcaaaacggcgaaggttcattcacgattgagcctagcaaggttgaaaaaattggacaactgttgctagatacgaagatgcgtaagttggaccgccaaaaagcggttgccaaattgttagaggtgaaggtcgctgacaaagaggagaccaagcgcaacaagcaaattgcaacggcgatgagtaagttagttcttggctacaaggcggactttgcaacggtagcgatggcgaatggcaacgaatggaagatcgatttaagttctgaaaccagtgaggacgagattgaaaaattccgggaagaattgagtgatgctcaaaatgatatcttaacggaaatcactagcctgttctcgcagatcatgctgaatgaaatcgtgccaaatgggatgtcgatttctgaatcgatgatggatcgttattggatgcacgaacgtcaattagcggaagttaaggaatacttggcgacccaaccagctagcgcgcggaaagattttgaccaagtgtataacaaatacattgggcaagcgccaaaggaaaagggctttgaccttgaaaagggactcaagaagattttatccaaaaaggaaaattggaaagaaatcgatgagttactcaaggcaggtgatttcttaccaaagcaacggacatcagccaatggggtcatcccacaccagatgcaccaacaagaattggaccgaattattgaaaagcaagctaagtactacccgtggctagcaacggaaaacccagccactggtgaacgtgatcgtcaccaagcgaagtatgaacttgatcagctagtttccttccggattccttactatgttggaccgctagtaacgcctgaggttcaaaaggcgacatctggcgctaagtttgcttgggcaaagcggaaagaagatggggagattaccccttggaacctgtgggataagattgaccgtgctgaatcagctgaagcctttatcaagcggatgacggttaaggatacgtatctattaaacgaggatgtcctgcctgctaacagcttgctataccaaaagtacaacgtcttaaacgaactaaacaacgttcgagtgaatggacgccgcctatcagtcggaattaaacaagatatttacactgagctcttcaagaagaaaaagacggtgaaggcaggtgacgtggccagcctagtgatggcgaagacacgaggagttaacaagccaagtgttgaaggtttatccgatccgaagaagttcaattcaaatttggcaacctaccttgatctaaagtcaattgtgggtgacaaggttgatgataaccgttatcaaatggatctcgaaaacattatcgagtggcgttccgtctttgaagatggggaaatttttgcggacaagttaactgaagtggaatggctgacggatgagcaacgttctgcccttgttaagaaacggtataagggctggggacgtttatccaagaagctactgacgggaatcgttgacgagaacggccaacggatcattgatctgatgtggaatactgatcaaaacttcatgcagattgtcaaccagcctgtctttaaagaacagattgaccaactgaaccaaaaggccatcaccaatgatgggatgactttgcgggagcgggtcgagagcgttctggatgacgcctatacttcaccgcagaacaagaaggccatctggcaagttgttcgggtggtggaagatattgttaaagcggtcgggaatgcaccaaagtcgatttcaattgaatttgcccgtaatgaaggcaacaagggagaaataacccggagccggcgtactcaattgcagaaattatttgaagatcaggcccatgaattagttaaggatacgagcttgactgaggaattggagaaggcaccggatctttccgatcgttattacttctacttcacccaaggtggtaaggatatgtacaccggtgatccaatcaacttcgatgaaatttctaccaagtatgatattgaccacattttgccacaatccttcgtgaaggatgattccttagataatcgggtgttagtaagtcgggcggagaataataagaagtctgaccgggtgccagctaagctttacgcagccaagatgaaaccatactggaaccaacttttgaagcagggattgatcacgcaacggaagtttgaaaacctgacgatggacgttgatcaaaatattaagtatcggtcacttggattcgtgaagcgccaattagttgaaacacgccaagttatcaagttgacggctaacatcttgggtagtatgtaccaagaagccgggacggacatcattgagactcgggctggtttaactaagcaattacgcgaggaattcgatttaccaaaggttcgtgaagtaaacgactatcaccacgcagttgatgcttacctgacaacgtttgctgggcaatatttgaaccgccgttatccgaaattacgctccttcttcgtatacggtgagtacatgaagttcaagcatgggtcagatctgaagctacgtaactttaacttcttccatgaattgatggaaggcgacaagagccaaggtaaggttgtcgatcaacaaactggtgagctgattacgacaagggatgaagtagccaagagctttgatcgattattgaacatgaagtatatgctggtatcgaaggaagttcacgaccggagtgaccaactgtatggagcaacgattgtaacagcaaaggaatctggtaagctcacttcaccaattgagatcaagaaaaatcgacctgttgatttgtatggtgcttatacgaatggaacgtcagctttcatgacgatcattaagtttactggaaacaaacctaagtataaggtgattggggttccaacaacatcggcggtcggtttaaaacgagttgggaaaccaggcagtgaatcatataaccaagaattacatcgaatcattaaatctaatccgaaggtaaagaaagattttgagattgtagttccacatgtttcgtatagtcagttgatagttgatggtgactgcaaatttaccctagctagtgatacttatcagcatccggcaactcagctagttctttctaaagaatcgatggaaataattgcagatgattttaaatttgtgaaagaaaatccggcaactgcggatgaacaacttgttagggtttttgatgaaattgttaatcaaatgaaccattactttactatctttgaccaacgtagtaatcgtcaaaaggtaacgaaggctcgagataagtttgtatcgttaccaacggaatcagagtatgagggtgctaagaaaacgcaagtagggaagacagaagtcattacgaacttactgatgggtctacatgccaatgctgcacaaggtgatttgaaagtattaggattatcaacctttgggtttttccagagttcaggtggactgaatttaagtgaagatgcaatgatcgtataccagtcaccaaccggtttgtttgaacgtcgcatttgtttgaaagacatttaa

SEQ ID NO: 29 - DNA, 4014 bp, Enterococcus faecalis
atgaagaaagactacgttatcggtttggatatagggactaattctgtcggttgggcagttatgacagaagactatcagttggtgaagaaaaaaatgcctatttatggaaacactgaaaaaaagaaaatcaagaaaaatttttggggtgtgcgtttatttgaagaagggcatacagccgaagatcgccgattaaaaagaacagcacgacgaagaattagtcgtcgacggaatcgtttacgctacttacaagctttttttgaagaagcgatgacagctttggatgaaaacttttttgctcgtttacaagagagttttttagtgcctgaagataagaagtggcacagacatccgatttttgctaagttggaagatgaagtagcttaccatgaaacgtatccgacaatctaccatttacgcaaaaaattagcagattcatctgagcaagcagatttacgactaatttatttggcgttggcatatattgtcaaatatcgtggacattttttaattgaagggaaattaagtacagaaaatatttctgttaaagaaaaatttcaacaatttatgatcatttataaccagacctttgtgaatggagagggtcgcttagttagtgcgccattacctgaatctgtcttgattgaggaagagttgactgaaaaagcttctcggactaaaaaatctgaaaaagtcttacaacaatttcctcaagaaaaagctaatggcttatttggtcagttcttaaagctaatggtagggaataaggctgactttaaaaaagtttttggtttggaagaagaagccaaaataacctacgctagtgaaagctatgaagaagatttagaaggcattttagcaaaggttggggatgaatatagtgacgtgtttttagctgctaaaaatgtgtacgatgcagttgaattatcaacgattttagcagattcggataaaaaaagttacgcgaaattatcttctagcatgattgtccgttttacagaacatcaagaagatttaaaaaaattcaaacgatttattcgtgaaaattgtccagacgaatatgataatctctttaaaaatgaacagaaagacggctatgcaggctacattgcacacgcaggtaaggtttcacagcttaaattttaccagtatgttaagaaaatcattcaagatattgctggagcagaatattttttagaaaaaattgctcaagaaaactttttaagaaagcaacggacctttgataatggggtgattcctcatcaaattcatttggctgagttacaagcaatcattcatcgtcaagcggcctattatccatttttaaaagaaaatcaagaaaaaattgaacaactggttacatttcgaattccttattatgtcggaccattatcaaaaggagatgcaagtaccttcgcttggctaaaacgtcaaagtgaggaaccaattcgaccttggaaccttcaagaaaccgttgatttggaccaatcagcgacagcctttattgaacgaatgaccaattttgatacgtatttaccttctgaaaaagttttaccgaaacatagtttgttatatgaaaagtttatggtatttaatgaattgaccaagatttcttatacggatgatcgaggcatcaaagccaatttttcaggtaaggaaaaagaaaaaatctttgattatctgtttaagacgcgtcgcaaagttaagaaaaaggatatcattcaattctatcgaaacgaatataatacggagattgtcacgcttagtggacttgaagaagaccaatttaatgctagttttagcacgtatcaggatttactgaaatgtggtttgacacgagcagaattagaccacccagataatgccgaaaaattggaagatatcataaaaattttaactatttttgaagatcggcaacgaattcggacgcaactttctacattcaaagggcagttctcagcagaagtactaaaaaaattagaacgcaagcactacactggctggggaagattgtcgaagaaattaatcaatggtatctacgataaagaatcgggtaaaacaattttggactatttagttaaagatgatggggtctcaaaacactataatcgcaattttatgcaactgattaatgattcacaattatcttttaaaaatgctattcaaaaagcacagtccagtgaacatgaagaaacattaagtgaaactgtcaatgaattagctggtagcccagcaataaaaaaaggaatttatcaaagtttaaaaattgtcgatgaactagtcgcgattatgggttatgcgcctaagcggattgttgtcgaaatggcacgtgaaaatcaaacgactagcactggcaagagaagatccatccaacgcttgaaaatagttgaaaaagcaatggccgaaatcggcagcaatttattaaaagaacaaccaacgactaatgaacagttacgagatacccgtcttttcctttactatatgcaaaatggtaaagatatgtacacgggagatgaattatcgcttcatcgtttatctcactatgatattgatcatattatcccacaaagttttatgaaagacgattcattggataacctagttttagtgggctctactgaaaatcgagggaaatccgatgatgtacctagcaaggaagttgttaaggatatgaaagcttattgggagaaattatatgctgctggcttaattagtcaacggaaattccaacgtctgaccaaaggggagcaaggtggcttgactctcgaagacaaagcgcattttatccaacgacaattagtagaaactcgtcaaattaccaaaaatgttgcagggatcttagatcaacgctacaatgccaagtcaaaagagaaaaaagtccaaatcatcaccttgaaagctagtttaacgagccaatttcgttcgatttttggcttgtataaagttcgtgaagtgaatgattatcaccatggacaagatgcttatttaaactgtgtggtcgcaaccacgttattaaaagtttatcctaatttagcaccagaatttgtttacggagaatatcctaagttccagacctttaaagaaaataaagccacggcgaaggctataatttatacaaatttgctgcgctttttcacggaagatgaaccacggttcacgaaggatggcgaaattctttggagtaacagttatttaaaaactatcaaaaaagaattaaattaccatcaaatgaatattgtcaaaaaagtagaagtgcaaaaaggcggtttttcaaaagagtcgattaaacccaaaggaccatcgaataaattgattcctgtcaaaaatggtttggatccccaaaaatatggcggttttgatagtcctatagttgcatatacagtgctattcacgcatgaaaaaggtaaaaaacctcttattaaacaggagatactgggcattacgattatggaaaaaacaaggtttgaacaaaatcctattctttttttagaggagaaaggcttcctacggcctcgtgtattaatgaaattgcctaagtatacactgtatgaatttccagagggacgccggcgcttattagccagcgctaaagaagcgcaaaaagggaaccagatggttttacctgaacatttacttacattactgtaccatgcgaaacaatgtttgttaccaaatcaatcagaaagtttggcttatgtagaacaacatcaaccagaatttcaagagattttagagagagtggttgactttgctgaagtgcatacattagccaagtcaaaagtccagcaaattgtgaaactttttgaagcaaatcaaacagcagatgtgaaagagattgcggcatcctttatccaacttatgcagtttaatgcgatgggcgcaccaagtacgtttaaatttttccaaaaagacattgagcgagcacgctacacgtcaatcaaagaaatttttgatgccactatcatttaccaatcgactacgggactgtatgaaacacgcagaaaggttgtcgactag

SEQ ID NO: 30 - DNA, 4014 bp, Bacillus cereus
atgaagaaagattacgttattggtctggatataggaactaattctgtcggctgggcagttatgacagaagactatcagttggtgaagaaaaaaatgcctatttatggaaacactgaaaaaaagaaaattaagaaaaatttttggggtgtgcgtttatttgaagaagggcatacagccgaagatcgccgattaaaaagaacagcacgacgaagaattagtcgtcgacggaatcgtttacgctacttacaagctttttttgaagaagcgatgacagatttggatgaaaacttttttgctcgtttacatgagagttttttagtgcctgaagataagaagtggcacagacatccgatttttgctaagttggaagatgaagtagcttaccatgaaacgtatccgacaatctaccatttacgcaaaaaattagcagattcatctgagcaagcagatttacgactaatttatttggcgttggcccatattgtcaaatatcgtggacattttttaattgaaggaaaactaagtacagaaaatacttctgttaaagaacaatttcaacaatttatggtcatttataaccaaacctttgtgaatggggagagtcgcttagttagtgcgcctttacctgaatctgtcttgattgaggaagagttaactgaaaaagcttctcggactaaaaaatctgaaaaagtcttacaacaatttcctcaagaaaaagctaatggcttatttggtcagtttttaaagctaatggtagggaataaagctgactttaaaaaagtttttgctttggaagaagaagccaaaataacctacgctagtgaaagttatgaagaagatttagaaggcattttagcaaagattggggatgaatatagtgacgtgtttttagctgctaaaaatgtgtacgatgcagttgaattatcaacgattttagcagattcggataaaaaaagtcacgcgaaattatcttctagcatgattgtccgttttacagaacatcaagaagatttaaaaaaattcaaacggtttattcgtgaaaattgtccagacgaatatgataatctctttaaaaatgaacagaaagacggctatgcaggttacattgcacacgcaggtaaggtttcacagcttaaattttaccagtatgttaagaaaatcattcaagatattgctggagcagaatattttttagaaaaaattgctcaagaaaactttttaagaaagcaacggacctttgataatggggtgattcctcatcaaattcatttggctgagttacaagcaatcattcatcgtcaagcggcctattatccatttttaaaagaaaatcaagaaaaaattgaacaactggttacatttcgaattccttattatgtcggaccattatcaaaaggagatgcaagtaccttcgcttggttaaaacgtcaaaatgagaaaccaattcgaccttggaaccttcaagaaaccgttgatttggaccaatcagcgacagcctttattgaacgaatgaccaattttgatacgtatttaccttctgaaaaagttttaccgaaacatagtttgttatatgaaaagtttatggtatttaatgaattgaccaagatttcttatacggatgatcgaggaatcaaagccaatttttcaggtaaggaaaaagaaaaaatctttgattatctgtttaagacgcgtcgaaaagttaagaaaaaggatataattcaattctatcgaaacgaatataatacggagattgtcacgcttagtggacttgaagaagaccaatttaatgctagttttagcacgtatcaggatttactgaaatgtggtttgacaagagcagaattagaccacccagataatgccgaaaaattggaagatatcataaaaattttaactatttttgaagatcggcaacgaattcggacgcaactttccacattcaaagggcagttctcagcagaagtactaaaaaaattagaacgcaagcactacactggctggggaagattgtcgaagaaattaatcaatggtatctacgataaagaatcgggtaaaacaattttggactatttagttaaagatgatggggtctcaaaacactataatcgcaattttatgcaactgattaatgattcacaattatcttttaaaaatgcgattcaaaaagcacagtccagtgaacatgaagaaacattaagtgaaactgtcaatgaattagctggtagcccagcaataaaaaaaggaatttatcaaagtttaaaaattgtcgatgaactagtcgcgattatgggttatgcgcctaagcggattgttgtcgaaatggcacgtgaaaatcaaacgactagcactggcaagagaagatccatccaacgcttgaaaatagttgaaaaagcaatggccgaaatcggcagcaatttattaaaagaacaaccaacgactaatgaacagttacgagatacccgtcttttcctttactatatgcaaaatggtaaagatatgtacacgggagatgaattatcgcttcatcgtttatctcactatgatattgatcatattatcccacaaagttttatgaaagacgattcattggataacctagttttagtgggctctactgaaaatcgagggaaatccgatgatgtacctagcaaggaagttgttaaggatatgaaagcttattgggagaaattatatgctgctggcttaattagtcaacggaaattccaacgtctgaccaagggggagcaaggtggcttgactctcgaagacaaagcgcattttatccaacggcaattagtagaaactcgtcaaattaccaaaaatgttgcagggatcttagatcaacgctacaatgccaagtcaaaagagaaaaaagtccaaatcatcaccttgaaagctagtttaacgagccaatttcgttcgatttttggcttgtataaagtccgtgaagtgaatgattatcaccatggacaagatgcttatttaaactgtgtggtcgcaaccacgttattaaaagtttgtcctaatttagcaccagaatttgtttacggagaatatcctaagttccagacctttaaagaaaataaagccacggcgaaggctataatttatacaaatttgctgcgctttttcacggaagatgaaccacggttcacgaaggatggcgaaattctttggagtaacagttatttaaaaactatcaaaaaagaattaaattaccatcaaatgaatattgtcaaaaaagtagaagtgcaaaaaggcggtttttcaaaagagtcgattaaacccaaaggaccatcgaataaattgattcctgtcaaaaatggtttggatccccaaaaatatggcggttttgatagtcctgtagttgcttatacagtgctattcacgcatgaaaaaggtaaaaaacctcttattaaacaggagatactgggcattacgattatggaaaaaacaaggtttgaacaaaatcctattctttttttagaggagaaaggcttcctgcggcctcgtgtattaatgaaattgcctaagtatacactgtatgaatttccagaggggcgccggcgcttattagctagtgctaaagaagcgcaaaaagggaaccagatggttttacccgaacatttacttacattactgtaccatgcgaaacaatgtttgttaccaaatcaatcagaaagtttggcttatgtagaacaacatcaaccagaatttcaagagattttagagagagtggttgactttgctgaagtgcatacattagccaagtcaaaagtccagcaaattgtgaaactttttgaagcaaatcaaacagcagatgtgaaagagattgcggcatcctttatccaacttatgcagtttaatgcgatgggcgcaccaagtacgtttaaatttttccaaaaagatattgagcgagcacgctacacgtcaatcaaagaaatttttgatgccactatcatttaccaatcgactacgggcctgtatgaaacacgcagaaaggttgtcgactag

SEQ ID NO: 31 - DNA, 4014 bp, Enterococcus faecalis
atgaagaaagactacgttatcggtttggatatagggactaattctgtcggttgggcagttatgacagaagactatcagttggtgaagaaaaaaatgcctatttatggaaacactgaaaaaaagaaaatcaagaaaaatttttggggtgtgcgtttatttgaagaagggcatacagctgaagatcgccgattaaaaagaacagcacgacgaagaattagtcgtcgacggaatcgtttacgctacttacaagctttttttgaagaagcgatgacagatttggatgaaaacttttttgctcgtttacaagagagttttttagtgcctgaagataagaagtggcacagacatccgatttttgctaagttggaagatgaagtagcttaccatgaaacgtatccgacaatctaccatttacgcaaaaaattagcagattcatctgagcaagcagatttacgactaatttatttggcgttggcccatattgtcaaatatcgtggacattttttaattgaaggaaaactaagtacagaaaatacttctgttaaagaacaatttcaacaatttatggtcatttataaccaaacctttgtgaatggagagagtcgcttagttagtgcgccattacctgaatctgtcttgattgaggaagagttaactgaaaaagcttctcggactaaaaaatctgaaaaagtcttacaacaatttcctcaagaaaaagctaatggcttatttggtcagttcttaaagctaatggtagggaataaagctgactttaaaaaagtttttggtttggaagaagaagccaaaataacctacgctagtgaaagctatgaagaagatttagaaggcattttagcaaaggttggggatgagtatagtgacgtgtttttagctgctaaaaatgtgtacgatgcagttgaattatcaacgattttagcagattcggataaaaaaagtcacgcgaaattatcttctagcatgattgtccgttttacagaacaccaagaagatttaaaaaaattcaaacgatttattcgtgaaaattgtccagacgaatatgataatctctttaaaaatgaacagaaagacggttatgcaggctacattgcgcacgcaggtaaggtttcacagcttaaattttaccagtatgttaagaaaatcattcaagatattgctggagcagaatattttttagaaaaaattgctcaagaaaactttttaagaaagcaacggacctttgataatggggtgattcctcatcaaattcatttggctgagttacaagcaatcattcatcgtcaagcggcctattatccatttttaaaagaaaatcaagaaaaaattgaacaactggttacatttcgaattccttattatgtcggaccattatcaaaaggagatgcaagtaccttcgcttggttaaaacgtcaaagtgaggaaccaattcgaccttggaaccttcaagaaaccgttgatttggaccaatcagcgacagcctttattgaacgaatgaccaattttgatacgtatttaccttctgaaaaagttttaccgaaacatagtttgttatatgaaaagtttatggtatttaatgaattgaccaagatttcttatacggatgatcgaggaatcaaagccaatttttcaggtaaggaaaaagaaaaaatctttgattatctgtttaagacgcgtcgaaaagttaagaaaaaggatataattcaattctatcgaaacgaatataatacggagattgtcacgcttagtggacttgaagaagaccaatttaatgctagttttagcacgtatcaggatttactgaaatgtggtttgacaagagcagaattagaccacccagataatgccgaaaaattggaagatatcataaaaattttaactatttttgaagatcggcaacgaattcggacgcaactttccacattcaaagggcagttctcagcagaagtactaaaaaaattagaacgcaagcactacactggctggggaagattgtcgaagaaattaatcaatggtatctacgataaagaatcgggtaaaacaattttggactatttagttaaagatgatggggtctcaaaacactataatcgcaattttatgcaactgattaatgattcacaattatcttttaaaaatgctattcaaaaagcacagtccagtgaacatgaagaaacattaagtgaaactgtcaatgaattagctggtagcccagcaataaaaaaaggaatttatcaaagtttaaaaattgtcgatgaactagtcgcgattatgggttatgcgcctaagcggattgttgtcgaaatggcacgtgaaaatcaaacgactagcactggcaaaagaagatccatccaacgcttgaaaatagttgaaaaagcaatggccgaaatcggcagcaatttattaaaagaacaaccaacgaccaatgaacagttacgagatacccgtcttttcctttactatatgcaaaatggtaaagatatgtacacgggagatgaattatcgcttcatcgtttatctcactatgatattgatcatattatcccacaaagttttatgaaagacgattcattggataacctagttttagtgggctctactgaaaatcgagggaaatctgatgacgtcccaagtaagaaagttgttaagaagatgaaagcttattgggagaaattatatgctgctggcttaattagtcaacggaaattccaacgtctgaccaagggggagcaaggtggcttgactctcgaagacaaagcgcattttatccaacggcaattagtagaaactcgtcaaattaccaaaaatgttgcagggatcttagatcaacgctacaatgccaagtcaaaagagaaaaaagtccaaatcatcaccttgaaagctagtttaacgagccaatttcgttcgatttttggcttgtataaagtccgtgaagtgaatgattatcaccatggacaagatgcttatttaaactgtgtggtcgcaaccacgttattaaaagtttaccctaatttagcaccagaatttgtttacggagaatatcctaaattccaggcctttaaagaaaataaagccacggcgaagactataatttatacaaatttgatgcgctttttcacggaagatgaaccacggttcacgaaggatagcgaaattctttggagtaacagttatttgaaaactatcaaaaaagaattaaattaccatcaaatgaatattgtcaaaaaagtagaagtgcaaaaaggcggtttttcaaaagagtcgattaaacccaaaggaccatcgaataaattgattcctgtcaaaaatggtttggatccccaaaaatatggcggttttgatagtcctgtagttgcttatacagtgctattcacgcatgaaaaaggtaaaaaacctcttattaaacaggagatactgggcattacgattatggaaaaaacaaggtttgaacaaaatcctattctttttttagaggagaaaggcttcctgcggcctcgtgtattaatgaaattgcctaagtatacactgtatgaatttccagaggggcgccggcgcttattagctagtgctaaagaagcgcaaaaagggaaccagatggttttacctgaacatttacttacattactgtaccatgcgaaacaatgtttattaccaaatcaatcagaaagtttggcttatgtagaacaacatcaaccagaatttcaagagattttagagagagtggttgactttgctgaagtgcatacattagccaagtcaaaagtccagcaaattgtgaaactttttgaagcaaatcaaacagcagatgtgaaagagattgcggcatcctttatccaacttatgcagtttaatgcgatgggcgcaccaagtacgtttaaatttttccaaaaagatattgagcgagcacgctacacgtcaatcaaagaaatttttgatgccactatcatttaccaatcgactacgggcctgtatgaaacacgcagaaaggttgtcgactag

SEQ ID NO: 32 - DNA, 3993 bp, Artificial sequence
  Cas endonuclease of Locus 14
atggaaaaagagtatacgattggattagatattgggacaaattcggttggatgggcagtgttgacggatgattatcgattagtcgcaagaaaaatgagtattcaaggagactcgaatagaaagaaaataaaaaagaatttttggggtgcacgtttattcgaagaaggtaaaactgcacaatttcgacggatcaaacgaacgaaccgtcgtaggatcgcacgaagacgtcaaagagttttagcattacaagatatttttgcagaagagatacataaaaaagatcccaatttttttgctcggctagaagaaggagatcgtgtggaagcagacaaacgatttgctaagtttcctgtttttgctacattgtcggaggaaaaaaattatcatcgtcaatatccgaccatctaccatttgaggcatgatctagcaaactcaaaagaacaagcagatattcgtttagtgtacttagcgattgcccattgcttgaagtacagagggcactttttgtttgaaggagaattagatactgaaaatacctcggtaaccgaaaattatcagcaatttttacaagcataccaacagttctttccagaacctataggagatttggatgatgctgtccctattttgacagagcggctatctaaggcaaaacgagtggaaaaagtattagcttattatccatctgaaaaaagtactggaaattttgctcaattccttaaactaatggtcggaaatcaagcaaattttaaaaagacgtttgatttagaagaagaaatgaagttgaattttactcgtgattgttatgaagaggatttaaatgaactgctagaaaaaacaagtgacgattatgcagaattatttttaaaagcgaagggtgtgtatgatgcgattttactttcgcaaatcctttctaagtcagatgatgaaacgaaagctaagttgtctgcgaatatgaagttgcgctttgaagagcaccaacgagaccttaaacaattaaaagaactagtccgtagagacttacctaaaaagtacgatgatttctttaagaatcgcagtaagaatggatacgctgggtatgtcaaggggaaagcgacacaagaagatttttataaatttctaagaacagaactagctggattagaggaaagccaatcaatcatggaaaaaattgatctagagatctatctattgaaacaacgtacctttgcaaatggggtgattcctcatcaaatccatttagttgaaatgagagaaattatggatcggcagaaacgtttttatccttttctaaaaggggcacaaggaaaaatcgagaaactactgacgtttcgaatcccatattacgtaggaccgttggcacaagaaggtcaaagtcctttcgcttggatcaaacgtaagagtccgagccaaatcactccatggaattttgcagaagtggttgataaagaaaattcagccattgaatttattgagcgaatgacaaatcaagatacgtatttaccaaaggaaaaagttttaccaaaacaaagtttgatttatcaaagattcatgatcttcaatgaattgacaaaagtcagttatacggatgaacgtggcaaatctcactatttttcaagtgaacaaaaacgcaagatttttaacgagttgttcaagcaacatccaagagtaacagaaaaacaattgaggaaatttttagagttgaacgagcagatcgattcaactgaaatcaaaggaattgaaacgtcattcaatgcttcttatagcacctatcatgatttgttgaaattatcagatcagatggatacattattagatgatcccgatatgacaacgatgtttgaagaaattatcaaaattttgacgatttttgaagacagagaaatgattagggaacaactgaaaccgtacgaaactgtcttaggtcttccagctatcaagaaattagcaaaaaaacattatactggttggggacggctatcggaaaaaatgatccaaggaatgcgagagaagcagtcccggaaaaccattcttgattatttgatcgatgatgatgattttccttgcaatcgtaatcgaaatttcatgcaactaatcaatgatgatcatctttcgtttaaagaaacgattgctaatgaattgatcatgagcgactcaaacgtattgcttgatcaagtgaaggctatcccaggaagtcctgcggtcaaaaaagggatttggcaaagtatcaaaatcgtcgaagaaatcattggtatcatcggtaaggcacctaagaacatagtgattgaaatggcacgtgagaatcaaagaacaagccgttcaagaccccgcttaaaagccttagaagaagcattgaagaatatcgacagtccattgttgaaagactatccaacagataatcaagcgctacaaaaagatcgactgtatttatattatttgcaaaatggaaaagatatgtatacaggtgaaccactagagattcatcgtttatcagaatatgatattgaccatattattcctagaagttttattgttgataattctttagataataaggtcctagtttcatcaaaagtcaatcgtggaaagttagataatgccccggacccacttgttgtcaaaagaatgcgatcacattgggaaaagctacatcaagcaaaattgatcagtgacaaaaaactagccaatcttacaaaacaaaatctgaccgaggcagacaaggcaagatttatccaacgccagttagtcgaaacaagacagataacgaaacatgttgccaatctgttacatcagcattttaatttaccagaagaagtaagtgcgactgagaaaacaagtatcattaccttgaaatcaacgttgacaagccaattccgtcagatgttcgatatttataaggtgagagagatcaatcatcaccaccatgcccacgacgcttatttaaacggagtagtcgcaatgactttactaaaaaaatatcctaagttggcaccagaatttgtctacggaagttatatcaaaggggatatcaaccagatcaataaagcaactgcaaaaaaagaattctattctaatatcatgaaattttttgaaagtgaagaaatcatttgtgatgagcaaggtgaagtgatttggaataaaaaacgtgatctctcaacaatcaagaagacgattggcgcacaccaagtgaatatcgttaagaaagtagaaaaacaaaaaggtggattctataaggaaacaattaattcaaaagcgaatccagaaaaactaattccaagaaaagcatcattagatcctttgaaatatggtggctatggtagcccacttgtggcatatacggtgatttttatctttgaaaaaggaaaacagaagaaggtaaccaaaggaatcgaaggaattaccgttatggaacaattgagattcgaacaagacccacgagagtttctaaaaacaaaaggctatgagggcgtaaaacaatggctgatattgcctaaatatatattattcgaagcacaaggtggatatcggagaatgattgcgagtcatcaagaaacgcaaaaagctaactcattgattttacctgaaaatctagttacattgctttatcatgcaagacattacgatgaaatcaatcataaagtgagttttgattatgtcaatgcgcataaagaagggtttaatgacatttttgattttatctctgactttggggtgcgttatattttggctcctcaacatcttgaaaaaataaaagttgcctatgaaaaaaataaagaggtagatctgaaagaaatgatagatgctattttatctttattgaaatttacgttatttggtgcttctgttgagtttaagttttttgatattaagatattaaaaagatataagagtttgaccgacatttgggaagcaaccattatctaccaatcggttactggattatatgaaaggcgagtggaggtaaggaagttatgggatggagaacgcttgtaa

SEQ ID NO: 33 - DNA, 3453 bp, Enterococcus faecalis
atgtacagtataggtttagatttagggattagtagtgttggttggtcagtaattgatgaacggacaggcaatgttattgatttaggtgtccgtttatttagtgcgaaaaatagtgaaaaaaatttagaacgacgcacaaatcgaggtggacgtcgtttaattagacggaaaacgaatcgcttaaaagatgcaaaaaaaatacttgcggctgttggattttatgaagataaatcattaaaaaatagttgcccgtaccaattaagagtaaaaggattgacagaaccattaagcaaaggagaaatttataaagtgactcttcacattttaaaaaaacgtggaattagttacttagacgaagatgatacggaagcagcgaaagaaagtcaagattataaggaacaagttagggaaaatgctcagttgttaacaaaatatacgccgggtcaaatccaattacagcggctgaaagaaaataatcgagtgaaaacaggaatcaatgctcaaggtaattatcagttaaatgtttttaaagtttctgcttatgcaaatgaattggcaaccattcttaaaacccaacaagccttttatcctaacgaattgacagatgattggattgcattatttgtacagcctggtattgcagaggaagctggattaatttatcgcaaacgaccgtattatcatggaccaggaaatgaagccaataacagtccttatggtcgttggtctgattttaaaaaaacaggccaaccagcaacaaatatttttgataaattgattggcaaagactttcaaggtgaactacgagcaagcggcttaagtctatctgcacaacaatataatttactcaatgatttaaccaatttaaaaattgatggagaaataccactttcgctagaacaaaaagaatacattttagcagaattaatgaccaaagaatttactcgttttggcgttaatgatgtggttaaattgctgggtgtaaaaaaagaacgattaagtggttggcgtttggataaaaaaggtaaaccagaaattcatacattaaaagcctatcgcaattggcggaaaatttttgctgaagcagggatcgatttggctacgttaccaacagaaacgattgactgtttagcgaaagttttaaccttaaataccgaacgcgaagggattgaaaatacattagcttttgaactgcctaagttagcagaaccagtaaagtcactagttttagatcattacaaagaattaagccaaagcattagcacgcaagcgtggcatcgtttttctttaaaaacattacacttattaattccagaactaatgaacgctacctcagaacaaaatacactcttagaacagtttcagttaaagtcaggtgttagaacacggtatagtgaatataataaattaccaacaaaagatgtcttggcagaaatttataatccaacggtgaacaaaacagtgagtcaagccttcaaagttatggatgctttgttggaaaaatatggcaaagagcaaattcgttacatcactattgaaatgcctagggacgataacgaagaagatgaaaaaaaacgaataaaagaattacatgcaaagaatagtcaacgaaagaatgacagccaaagttattttatgcaaaagtctggatggagccaagaaaaatttcaaacgaccattcaaaaaaatcgtcgttttttagctaagttattatactattacgaacaagatggcatatgtgcctatacaggactgtctatttctcctgaattattggttagtgattcaacagaaattgatcatattattccaatttcgattagcttagatgattctattaataataaagtactggttttaagtaaagctaatcaagtcaaaggacaacaaacaccatatgatgcatggatggacggttctttcaaaaaaactaacgggaaatttagcaactgggatgactatcaaaaatgggtggaaagtcgccattttagtcataaaaaagaaaataatttattggaaacgcggaatatttttgacagtgagcaagtcgaaaaatttttagctagaaatctgaatgatacgcgttatgccagtcgtttagttttaaataccttacagagtttttttgcgaatcagggaacgaaagttcgagtagtgaacggcagttttactcatactttacgtaaaaaatggggtgccgacttagataaaactcgtgaaacacatcatcatcatgccgttgatgcaacattgtgtgcagtcactccgtttgtcaaggttagtcgttatcactatgcagtgaaggaagaaactggtgaaaaagtcatgcgtgaaatcgatttcgaaactggtgaaattgtcgatgaaatgtcttaccaggaattcaaaaaatcaaagaagtatgaacgaaaaacctatcaggtaaaatggcctaattttcgtgagcaattgaagccagtaaacctccatccaagaattaaattttctcaccaagtggatcgtaaagctaaccgcaaactcagtgatgccactatttattctgttcgagagaaaacggaagtcaaaacgctgaaaagtggtaaacaaaaaataacgactgacgagtacacaatcggtaaaatcaaagacatttacacggtagatggttgggaagccttcaagaaaaaacaagataaacttttaatgaaagatcttgacgaaaagacctatgaacgattgttgtctattgcagaaacaactcctgattttcaagaagtggaagaaaaaaatggtaaggtaaagcgtgttaaacgttcaccgtttgctgtttactgtgaagaaaatgatattccagcgattcggaaatatgcgaaaaaaaacaatggaccacttattcgtagtttgaagtattatgacggtaaattgaataaacatattaatatcaccaaggattcacaaggacgacctgttgaaaaaactaaaaatggtcgcaaagttacactacaaagtttaaaaccatatcgctacgatatttatcaagatttagaaactaaggcttattatacagtacaactatattattctgacttacgttttgtggaaggtaagtatggaatcacagaaaaagaatacatgaaaaaagtcgccgaacagacaaagggacaagtggtgcgtttctgtttttctttacaaaaaaatgatggtttggaaattgaatggaaagatagccaacgctatgatgtgcgtttttataatttccaaagtgctaatagtattaactttaaagggttagaacaagaaatgatgccagcagaaaatcaatttaagcaaaaaccttataataatggagccatcaatttaaatatcgctaaatatggcaaagaaggcaaaaagttacgaaaattcaatacagatattttaggaaagaaacattatctgtattatgaaaaagaaccaaagaatattattaaataa

SEQ ID NO: 34 - DNA, 4371 bp, Artificial sequence
  Cas endonuclease of Locus 16
atggtttcccataaaatgattactttttttctctttatttttatgctttatgaaaaccaaatagcaatgactaaaaatatactaggattagacttaggaacgaactcaataggatgggcattgataaaacaggattttgaaaacaaacaaggtgaaattcttgggatgggaagcagaattatacctatgtctcaggatattttgggggaatttggaaaaggaaattctgtttctcaaactgcttctcggactagctatagaggtgtgagaagattacgtgaaagatttcttttgcgaagggaaagattacatagagttttaaatgttctgaactttttacccgcacattatgcttctcagatagattttgaaaagaggtttgggaaattcaaagaagaaactgagcctaagttggtttatgacgtgaatgaatttatttttaaaaattcgtttgaagaaatgctttatgattttagaaagtatcagccacagcttttagaaaatgataaaaaagttccctatgactggacgatttattatttacgtaacaaagccttaacccaaaaaatagagaaagaagaacttgcttggattcttttaaattttaatcagaagcgtggttattatcaattacgtggggaagattttgaagaagaaaaagataaaacttttgtacgcctaaaagttgataaaattgttgattcgggagacactataaagggcaaaatattatatgatgtttatttcgaaaatggctggaaatatgataaacagattgtaaaaacggaagattggatagaacgtgtaaaagaatttattgttacagaatcattcttaaaaaacggcgatataaaaagaacttttaaagctgttgattctgaaaaggattggattgctatcaaaactaaaacagaacaagaaattgataattcgaataaaaccgttgggacatacatttatgaaacacttcttcgaaatccaaaacaaaaaattaaaggaaaattggttcgtacgattgaaagaaaattctataaagatgagctgaaacagattctggaaaaacaaaaagaatttcatcttgaattaaagaatgatgatttatatagtgattgtattcgtgaattgtatcgaaataatgaagcgcatcaattgacgttgagtagaaaagattttgttcatcttttgatggaggatattattttttatcaaagacctttaagaagtcataaatcttctatttcaaactgtactttggaatttagaaaatataaagatgaaaatggagcagagcatattcaatatttaaaagcgattccaaaatcaaatccatattatcaggaattcagaatctggcaatggatttttaatctcaatatttataagagagatgacgagcaaaatcctgttacaaaaaagtttttaaacaccacccaagattttgaaaatctgtttgaatttctgaataacagaaaagaaattgaccaaaaggctttactcaaacatcttaaaataaatgagaaaacgcatcgttggaagtatgtagaagacaaaaagtatccttgcaacgaaaccaaaacaatgatttcatcaaggttggataaagttgaaaatatttctgaaaacttcctgacaagagaaattgaacagaagatttggcatattatctattctgtcaacgataaaattgaatatgaaaaagctttaaaatcttttgccaataaaaataatctggacgaagtttctttctttgaagcttttaaaaaattcccaccttttaaaagcgaatatggttctttttctgaaaaagcaataaagaaactgttgcctttaatgcgattgggaaaatattggaattatgctgatattgataaatattcaaaagacagaattcagaaaattatcaatggagaatatgatgaaaatatcaaagacaaggtaagggaaaaagcagttcatcttacgactgaaaatgattttcaaggtcagcaattgtggctggctcaatatattgtttacggaaggcattctgaagcttcaatgattggaaaatggaattctgccgatgatttggaagagtttttaaaagagtttaagcaacattcgcttcgaaatccgattgttgagcaggtcattaccgaaactttgcgcgttgtaaaagatatttggttgaaatacggaaatggagcgaaagatttctttaacgaaattcatattgagttgggaagagaaatgaaacttcctgcagatgatagaaaaaaactaacgaaccaaatttctgaaaacgaaaataccaatcttcgtatcaaggctttgctggctgaaatgataaacgaccattctgttgaaaatgttcgtccgttttcgcctatgcaacaggaaattttgaaaatttatgaagatggagtattgaattcaggtattgaaattgaagatgaatatttgaaaatcagcaaaaccgcacaaccttctccgtctgatttgaagagatacaaactttggttggaacagaaatacaaatcgccttacacaggacaaattattcctttaaataaattgtttacgccagaatatgaaattgaacatatcatacctcaaagccgatattttgatgacagctttagtaataaaattatttgtgaatcagccgttaataaattgaaggataattatatcggacttggatttattaagcaattcggagggactattattgagcttggttttggaaaaaatgtaaaggtttttgaagtcgaagaatatgaagattttgtcaaaaaacattatgcaaataatcgaagtaagagaaataaacttttattagaagaaattcctgaaaaaatgattgaacgtcagttgaatgatacacgtcatatcagtaagtatatttcaggtgtgctttccaatattgtaagagtagaagatggaacagatgaaggtgtaaattctaaaaatattgttcccggaaacggaaaaatcacaactcaattaaaacaggattggggactgaatgatgtttggaatgatttgatactgccacgttttgaaagaatgaatcaactaaccaattcaacagattttacagcttggaatgaaaatcatcaaaagtatttgccaactgttccgattgagttttcaaaaggattttcaaagaaaagaatcgaccatcgtcatcacgctttggatgctttggtgattgcttgtgctacaaaagaccacgtaaatttattgaataatcaatctgcaaaatcggagacgaaacgttacgatttgaaaaagagattgatgaagtttgaaaaagttgtttacaatcatacacaaacaggagagaaaatcgaaagagatgttccgaaaaagtttttgaaaccttgggaaaactttacggttgaagctaaaaacagtttggagaaaataattgtaagctttaagcaaaatctcagagtaatcaataaagctacaaattattatgaaaaatatgtggagaaagatggcttgaaaacgaaagaaagggtagagcagaccggaacgaactgggcgataagaaaatcattgcacgaagaaaccgtttcagggaaaattaacttgccttgggtggaaacaagcaatggagaatttattactgccacaagaaagtctttggacacaagcttcaatttggaaaaaatcaaaaaaattacggatatcggaattcagaaaattctcagaaattatcttgaggcaaaagatggcaatcccgaattggctttttcgccagaaggaattgaagatctgaataaaaatgttgaaaagtataatgatggtaaatcacatcagccaattatcaaagttcgtgtttatgaaaaaggcaaaggaaggtttgtcttagggcaaacaggaaataaaattgataaatacgttcagggttcccctaacttatttttcgcaatatataaagatgataatggtaaaaaaagttatgaaagtattcgtttagatattgcgattgaaagattaaagcaaggtttgcaagcagttccagaaacaaatcaaaatggatttgcattgtatcaaagcctgtctcctttagatttagtttacattcccacagaggatgaagttgaatcaccacatctaattgattttagtaaattagataagataaaattggaaaggatttataatgtaaatgacttctcaggatatacaatttacttcagccaaaattcatttgctaaaaacatttatcctaaagagatggatatgacctggaacgaaaaaaaacaaaaaccatcaggttcgtttgattctaaaacagcttcatacaataaaaaatcgattaaagatatttttattaaaatgaaaattgaccgtttaggaaatatttcaaaagcgtaa

SEQ ID NO: 35 - DNA, 4389 bp, Artificial sequence
  Cas endonuclease of Locus 17
atgacaaatatagaagaaaaaatatttaatacaattatgggaatccgtaatttgaatgctttttttatttatattttaggtgatattcaaaacataactgtgatgattaaaaataaacttggcttagacttgggaacgaactccataggatgggcattgataagacaggattttgaaaacaaatacggagaaattcttgggatgggaagcagaattattccgatgtcacaagatattctgggcgattttggaaaagggaattctgtttcgcaaaccgcagaacgaacaaaatatagaagtgtgagaagattacgtgaacgatttttattgaggagagaacgactacacagacttttacatcttttaaattttcttccacaacattatgcttcacaaattgattttgaaaaaagattcggaaagtttaaagtggaaaccgaaccaaaactggcttggaaaaatattgaaggaaaattttcattccttttccaaaactctttcaatgaaatgcttgaagattttaatgcaaatggacaggatttaaaaattccttacgactggacaatttattttctccgaaaaaaagcactttcacaaaaaattgaaaaggaagaattggcgtggattcttttaaactttaatcaaaaacgtggatattatcaattgcgtggtgaggaagaggaagagaatcctaataaacaggttgagttttattctttaaaagtcatagacgttttagcagatgaacctcaaaaaggaaaatctgatatttggtattctttgattttagagaatggatggatttacagacgttcaagtaaaattccattatttgactggaaagataaaacaagagattttattgtaaccacggacttgaatgatgatggaagcattaaaaaagataaagacggaaatgaaaaaagaagtttccgtgcgccgggtgagaatgattggactttggtaaaaaagaaaaccgagcaggaaatcgagcaatctcacaaaaccgttggaacctacatttacgaagcacttcttgataatcccaaacaaaaaataaagggaaaactgattcgtaccattgaaagaaaattttacaaagaagaactcagacagattttagaaaagcaaaaggaatttcatcaggaattacaaagtgatgatttgtataatgattgtattcgtgagttgtaccgaaacaacgaatcacatcaacttattttgagcaagaaagattttgttcatcttttgatggaggatcttattttctaccaaagaccgctgagaagccagaaatcttctgtttctaactgtaccttggagttcagaaagtataaagatgaaaatggagcagaacatatacaatatttaaaagccattccgaaatctaatccttattatcaggaattccgcctttggcaatggatctacaatttaaacatttatagaaaagatgatgaagcgaatgttaccaaagattttttaaatacgacccaagatttagaaaatctgtttgagtttttaaatatcagaaaagaaattgaccaaaaaggattactaaaacattttaaactcaatgaaaaaaaacatcgttggaattttgtagaagaaaagaaatatccttgcaacgaaactaaaacgatgatttcttctcgattggataaagtggataatatttctgatgatttcctgacaagggacattgagcagaaaatttggcacatcatttattccgttaatgataaagtagagtacgagaaagccttaaaatcttttgcgagaaagtatcatctggatgaaagttctttttttgaggctttcagaaaatttccgccatttaaaagtgaatatggttccttttcggaaaaagcaattaagaaattgttggctttgatgcgattaggaaaatattggaactatgcagatgttgataaattttcaaaagacagaattcagaaaatcattaacggagaatatgatgaaaatattaaagataaagtgagagaaaaagcaataaatctcacatcagaaaatgattttcaggggttacaattgtggttggctcaatatataatatatggaaggcattcagaagcatctatgattggaaaatggaattctgcggatgatttagaaatgtttttaaaagattttaaacaacattcgcttcgcaatccgattgtagaacaggtgattacagaaactcttcgtgtggtaaaagatatttggttaaaatatggaaatggagcaaaagattttttcaatgaaattcatattgagttgggaagagaaatgaagcttcctgcgggtgatcgaaaaaaactcacgaatcaaattaccgaaaacgaaaacaccaatctccgcatcaaagctctattggcagaaatgatgaatgatcattcagtagaaaatgttcgtccgttttcgcctatgcaacaggaaattttgaaaatctatgaagacggcgttttaaattcaggtattgagattgaagatgaatatttgaaaataagcaaaacggcacagccttcttcttcagatttaaaaagatataaactttggctggaacaaaaatataaatcaccttataccgggcaaattattccattaaataaattattcacaccggaatacgaaattgaacacattattccgcaaagccgatattttgatgacagttttagcaataaagtaatttgcgagtcggcggttaataaattgaaagataattatatcggacttggatttattaagcagtttggaggaactattattgagcttggtttcgggaaaagtgtaaaggtatttaatatagaagagtatgaagattttgtaaagaaacattatgcaaacaatagaggcaaaagaaacaagcttttgatggaagatattcctggaaaaatgattgaacggcaattgaacgatacccgctatatcagtaaatatgtttccggaattctttccaatattgttcgggtagaagacggttcagacgaaggggttaattctaaaaacatcgttccgggaaatggaaaaatcactacccaactgaaacaagattgggggttgaatgatgtttggaatgatataattttaccacgttttgaaagaatgaatcaacttactaattcaaaagattttaccgcctggaatgaaaatcatcaaaagtttttacctaccgttccaattgagttttccaaaggattttcaaagaaaagaattgaccatcgtcatcatgctttagatgctttggtgattgcctgtgccacaaaagatcacgtgaatttattaaataatcaatcggcaaaatcggataccaaacgatacgatttgaaaaagaaattgatgaagtttgaaaaagtagtttattatcatacgcaaacaggggagaaaatagaaagggaaataccgaaacaatttttaaaaccgtgggaaaactttacagttgacgcaaaacataatctggaatctattattgtaagttttaagcaaaaccttcgtgttattaataaagcaactaattattacgaaaagtatgttgaaaaagacggtacaaaaaataaggaaagagtagagcagaccggaacaaactgggcgattagaaagccaatgcataaggatacggtttccggaaaagtagatttaccttgggtgaaagttccaaaaggaaaaattttaacagcaacgaggaaaagccttgatatttcatttgatttaaaatcaatagcatctattactgatacagggattcagaaaattctcagaaattatctgaaattcaaaggcagtccggaacttgcattttctccagaaggaatcgaagatctgaataagaatattgagaagtacaatgatggaaaatctcatcaaccgatcaataaagtaagagtttttgaactgggaagtaaatttcaggtaggacaaaccggaaataaaaaagataaatatgtagaagctgcaaaaggaaccaatctgttttttgctgtttatgaaaatgaaaatagaaacagaagttatgaaaccattcctttgaatgaggttatagaaagacaaaagcaaggtttatctgtggttgacttaaaaggaacaattgatttttttctttgcccgaatgatttagtttatattccttcagaagatgaacttgaaaatagtagcaacattgacttcaaaaattttaaagaagaacaaaacaaaaaaatttataaagtagttagttttagtggaagtcagttgttttttataagacaggaaattgccatatcaattgtaaataaagcagaattttccaccttgaataaaatggagcgtagtattgatgggttaatgattaaggaaaattgtatcaaattaaaagtagaccgtttgggaaatatttctaaagcatag

SEQ ID NO: 36 - DNA, 4323 bp, Artificial sequence
  Cas endonuclease of Locus 18
atgaaaaatatacttggactggacttgggaacaaactctattgggtgggctttagtaaaacaggattttgaaaacaaacaaggtgaaattcttggaatggggaccaggataattccgatgtctcaagatattttgggcgattttggtaaagggaattctgtttcgcaaactgcggaacgtacaaaatacagaagtgtaagaagattacgtgaacgatttcttctacgaagggagaggcttcacagggttttaaacattttgaattcccttccagaacactatgcttcacagattgattttgaaaaacgatttgggaagttcaaagttgaaactgaaccaaaattggcctggaaaaatattgaaggacatttttcatttctgttccaaaactctttcaacgagatgcttgaagattttaaaacgaacggacaggatttaaaaataccgtacgactggacgatttattatctccgtaaaaaggcactttctcaaaaaattgaaaaagaggagttggcctggattcttttgaattttaaccaaaaacgtggatattatcaattgcgtggggaagaagaggaagaaaatcctaataaaattgttgaattttattctttaaaagttgtggatgttctagcagatgagccacaaaaaagcaaatcagatatatggtattctttggttttagaaaatggatggatttacagaagggcaagtaaaatatcgttgtttgattggaaagataaaacaagagattttattgtaacaactgatttgaatgatgatggaagtgttaaaacagacaaagacggaaatgaaaaaagaagtttccgggcaccgggtgagaacgattggactttggtaaagaagaaaacagagcaggaaatcgagcagtctcataaaaccgttggaatatatatttacgaaactctccttaataatcccaaacaaaaaatcaaagggaaactagttcgtacgattgaaagaaaattctataaagaagaactcaggcagatattagaaaagcaaaagcagttccatcaggaattacaaaatgatgatttatataattgttgtattcgcgagttgtacagaaataatgaagcccatcaactgactttaagtaaaaaagattttgtacatctttttatggaggatattgttttctaccaaagaccgttgagaagccagaagtcttctatttccaactgtactttggaattcagaaaatacaaagatgaaaatggagcagaacatacacaatatttaaaagccattccaaaatcgaatccatattatcaggagtttcgtctctggcaatggatttttaatcttaatctatataaaaaagataatgatgaaaacgttatcaaagaatttttaaccactacccaggatatcgaaaatctgtttgagtttttaaataacagaaaagagattgatcaaaaagctctattgaaacattttaagctcaatgagaaaacacatcgttggaattttgtagaggataaaaaatacccctgcaatgaaacgaagacgatgatttcaactcgattggaaaaagtagaaaatatttccgatgattttctgaccagggaaatcgaacaacagatttggcatattatctattctgtcaatgataaaatagaatacgaaaaagccttaaaaacctttgcatcaaaacatcatctagacgaaagttcttttttcgaggctttcagaaaatttccaccatttaaaagcgaatatggttcctattcggaaaaagcaattaagaaattgttgcctataatgcgattgggcaaatattgggattatgccaatattgatcagtcttcaaaagacaggattaagaagatcattaatggagaatatgatgaaaatataaaagataaggtaagagaaaaggcagtccatcttacgaatgaaaatgatttccagggtttacaattgtggctggctcaatatattgtatatggaagacattcggaagcatcaataacagcgaaatggaattcagctgatgatttggaagaatttttaaaagattttaaacaccactcgcttcgcaatccaattgtagagcaggtcattactgagactttacgtgttgtgaaagatatttggctaaaatacggaaaaggagcaaaagacttcttcaatgaaattcatatagagttgggaagggaaatgaaacttccggctgaagatagaaagaaacttacgagccaaattattgaaaatgaaaatacgaatctccgcatcaaagctctattagctgaaatgatgaatgatcatgctgtagaaaatgttcgtccgttttcaccccagcaacaagaaattctgaaaatttatgaggacggtgttttaaattcaggcattgaaattgaagatgaatatttaaaaataagcaaaacggcgcaaccttctccttcagatttaaaacggtataaactttggctggaacagaaatacaaatcgccttataccgggcaaatgattccactaaataaattgtttacgccagaatatgaaattgaacatattatcccacaaagtcgatactttgatgatagttttagtaataaaattatttgtgaatcggcagttaacaaattgaaggataattatatcggacttggatttattaagcagtttggaggaactattattgaacttggtttgggtaaaagcgtgaaggtttttgatattgatcaatacgaagattttgttaagaagcactacgccaataaccgaagtaaaagaaataaacttcttttagaagatattcctgaaaaaatgattgaacgtcagatcaatgatactcgttatatcagtaaatatatttccggtatactttctaatattgttcgcttagaagatggttcggatgaaggagtaaattctaaaaacattgttcccggaaatggaaaaattactacccaattgaaaaaggactgggggttgaatgatgtttggaatgacttgattttaccccgttttaaaagaatgaatcagttgaccaattcgacggattttaccgcctggaacgaaaattttcaaaagtttttgccgaccgttccaattgagtattcgaaaggtttttctaaaaaaaggatcgaccatcgtcatcatgctctagacgctttggtaattgcttgtgctacaaaggatcacgtaaatttattaaataatcaatcggcaaaatcggaaaccaaacgctatgatttgaaaaagaaattaatgaagtttgaaagagttgtttatttccatacgcaaacaggggagaagatcgaaagagaagtgccaaaacaatttttaaaaccctggaaaaattttactgttgatgctatgcataatttggaaacggttattgtaagttttaaacaaaaccttagggtcattaataaagcaacgaattattacgaaaaatatgtagagaaagatggtgtaagaaataagacaagaataaagcaaaagggaataaattgggcgattagaaaaccaatgcataaagatacggtttccggtaaagtagatttaccttgggtaaaagtcccaaaaggaaaaattttaacagcaacaaggaaaagccttgacgcttcattcgatttaaaatcaataggctccattactgatacagggattcaaaaaattctcaaaaattatttaatgcataaagacggaaatacggaattggctttttcacccgaaggaattgaagatttgaataaaagtattgagaagtataatgatggtaaacctcatcagcccatcaacaaagtaagggtttttgaactgggtagtaaatttcaggtaggacaagccggaaataaaaaagataaatacgtagaagccgcaaaaggaaccaatttgttttttggagtgtacgaagataaaaacggcaagagaagctatgaaaccattcctttgaatgaggtgattgaaaggcaaaagcaaggtttacctgtggttgacttaagaagtacaaatgatttctatttatgcccgaatgatttggtttatattctatctgatgatgagcggggtaatatgacaaatatcgattttgaaagcctttctgatgaacaagttaaaaggatatataaatttgttagttgtacaggaggtgagggacattttattccttacgcaaatgcgacagaaataataaaaaatgaaaatggtacaaatagtaaaagtgagagaatgcagaatttctatgatgggagttgtatgtttgataaaaacgccaagcccattatgataaaagaaaactgtgtaaaacttaaagtcgaccgtttagggaacattgcaaagatataa

SEQ ID NO: 37 - DNA, 4323 bp, Artificial sequence
  Cas endonuclease of Locus 19
atgaaaaatatacttggactggacttgggaacaaactctattgggtgggcgttggtaaaacaggattttgaaaacaaacaaggtgaaattcttggaatgggagtcaggataattccgatgtctcaagatattttgggcgattttggtaaagggaattctgtttcgcaaaccgcggaacgtacaaaatatagaagtgtgagacgattacgtgaacgatttcttctacgaagggagaggcttcacagggttttaaatattttgaatttccttccagaacactatgcttcacagattgattttgaaaaacgatttgggaagttcaaagttgaaactgaaccaaaattggcctggaaaaatattgaaggacagttttcatttctgttccaaaactctttcaacgagatgcttgaagattttaaagcgaacggtcaggatttaagaataccgtacgactggacgatttattatcttcgtaaaaaagcactttatcaaaaaattgaaaaagaggagctggcctggattcttttgaattttaaccaaaaacgtggatattatcaattgcgtggggaagaagaggaagaaaatcctaataaacttgttgaattttattctttaaaagttgtagatgttcttgcagatgagccgcaaaaaagcaaatcagatatttggtattctttggttttagaaaatggatggatttacagaagggcaagcaaaatattgttgtttgattggaaagataaaacaagagattttattgtaacaactgatttgaatgatgatggaagtgttaaaacagacaaagaaggaaatgaaaaaagaagtttcagggcaccgggtgagaacgattggactttggtaaagaagaaaaccgagcagaaaatcgagcagtctcataaaaccgttggaatgtatatatacgaaacgctacttgctaatcctaaacaaaaaatcaaaggaaaattagttcgtacgattgaaagaaaattttacaaagaagagcttagacagatattagagaagcaaaaggagtttcatcaggaattacaaaatgatgacttatataatgattgtattcgtgagttgtacagaaacaatgaagctcaccaactgactttaagcaaaaaagattttatacatctttttataaaggatattgttttctaccaaagaccgttgagaagccagaagtcttctattttcaactgtactttggaattcagaaaatacaaagatgaaaatggagcagaacatacgcaatatttaaaagcaattccaaaatcgaatccatattatcaggaatttcgtctttggcaatggatttttaatcttaacctatataaaaaagataatgatgaaaacgttatcaaagaatttttaaccactacccaagatgtcgaaaatctgtttgagtttttaaacaacagaaaagaagttgatcaaaaaactttattgaaacattttaagctcaatgagaaaacacatcgctggaattttgtagaggataaaaaatacccctgcaacgaaacaaagacgatgatttcaacccgattgcagaaagtagaaaatatttccggggattttctgacgagggaaatcgaacaaaagatttggcatattatatattctgtcaatgataaaattgaatacgaaaaagccttaaaatcctttgcgttaaaacatcaacttgacaaaagttcttttttcgaggctttcagaaaatttccaccatttaaaagcgaatatggttccttttcggaaaaagcaattaagaaattgttgcctttaatgcgattgggtaagtattgggattatgccaatattgataagttttcaaaagacaggattcagaaaatcattaatggagaatatgatgaaaatataaaagatagggtaagagaaaaggcggtccatcttaggagtgaagatgatttccagggtttacaattgtggctggcccaatatattgtatatggaagacattcggaagcatcaataacagggaaatggaattcagctgatgacttggaagaatttttgaaagattttaaacaccacttgcttcgcaatccaattgtagagcaggtcattacagaaactttacgtgttgtaaaagatatttggctaaaatatggaaaaggagcaaaagatttcttcaatgaaattcatatagagttgggaagggaaatgaaacttccagctgacgatagaaagaaactcacaaaccagattactgaaaacgaaaatacgaatctccgcattaaagctctattaacagaaatgatgaatgatcatgctgtagaaaatgttcgtccgttttcgccccagcaacaagaaattctgaaaatttatgaggacggcgttttaaattcaggcattgaaattgaagatgaatatttaaaaataagcaaaacggcgcaaccttttccttcagatttaaaacggtataaactttggctggaacagaaatacaaatcgccttatactgggcaaattattccattaaataaattgtttacaccagaatatgaaattgaacacattattccacaaagccgatactttgatgacagttttagtaataaaattatttgtgaatcggcggttaacaaattgaaagataattatatcggacttggatttattaagcagtttggaggaactattattgaacttggtttcgggaaaagcgtaaaggtttttgatattgatgaatatgaagattttgtcaagaagcactacgccaataaccgaagtaaaagaaataagcttctcttagaagatattcctgaaaaaatgattgaacgtcagatcaatgatactcgttatatcagtaaatatatttccggtatactttctaatattgttcgcttagaagatggttcggatgaaggagtaaattctaaaaacattgttcccggaaatggaaaaattactacccaattgaaaaaagactgggggttaaatgatgtttggaatgacttgattttaccccgttttaaaagaatgaatcagctgaccaattcgacagattttaccgcctggaacgaaaattttcaaaagtttttgccgaccgttccaattgaatattccaaaggtttttctaaaaaaagaatcgaccatcgtcatcatgctttagacgctttggtaattgcttgtgctacaaaggaccacgtaaatttattaaataatcaatcggcaaaatcggaaaccaaacgctacgatttgaaaaagaaattaatgaagtttgaaagagttgtttatctccatatgcaaacaggggagaaaatcgaaagagaagtgccaaaacaatttttaaaaccttgggaaaattttactgtagatgttaagtataatttggacatggttattgtaagttttaagcaaaaccttagggtcattaataaagcaacgaattattacgaaaaatatgtagagaaggatggtgcaagaaataagacaagagtagagcaaaagggaataaattgggctattagaaaaccaatgcataaagatacggtttccggtaaagtagatttaccttgggtaaaagttccaaaaggaaaaattttaacagcgacgaggaaaagccttgatgcttcattcgatttaaaatcaattgcctccattactgatacagggattcaaaaaattctcaaaaattatttaatgcttaaagatggaaaccctgaattggctttttcacccgaaggaattgaagatttgaataaaagtattgagaagtacaatgatggcaaacctcatcaacccatcaataaagtaagggtttttgaactgggtagtaaatttcagataggacaagccggaaataaaaaagataaatacgtagaagccgcaaaaggaaccaatttgttttttgcagtgtacgaagatgaaaacggcaagagaagctatgaaactattcctttgaatgaggtgattgaaaggcaaaagcacggtttacctgtggttgatttaacaagtacaaatgatttctatttatgcccgaatgatttggtttatattctatctgatgatgagcgggataatatgacaaataacgattttgaaaacctttctgacgaacaagttaaaaggatatacaaatttgttagttgtacaggaggtgaggggcattttattccttacgcaagtgcgacagaaataataaaaaatgaaaacggtacaaatagtaaaagcgagagaatacagaatttctatgatggtagttgtatgcttgataaaaacagcaagcccattatgataaaggaaaactgtgtaaaacttaaagtcgaccgtttaggtaacatttcaaagatataa

SEQ ID NO: 38 - DNA, 4323 bp, Artificial sequence
  Cas endonuclease of Locus 20
atgaaaaatatacttggactggacttgggaacaaactctattgggtgggcgttggtaaaacaggattttgaaaacaaacaaggtgaaattcttggaatgggagccaggataattccgatgtctcaagatattttgggcgattttggtaaagggaattctgtttcgcaaaccgcggaacgtacaaaatatagaagtgtgagacgattacgtgaacgatttcttctacgaagggagaggcttcacagggttttaaatattttgaatttccttccagaacactatgcttcacagattgattttgaaaaacgatttgggaagttcaaagttgaaactgaaccaaaattggcatggaaaaatattgaaggacagttttcatttctgttccaaaactctttcaacgagatgcttgaagattttaaagcgaacggtcaggatttaagaataccgtacgactggacgatttattatcttcgtaaaaaagcactttatcaaaaaattgaaaaagaggagctggcctggattcttttgaattttaaccaaaaacgtggatattatcaattgcgtggggaagaagaggaagaaaatcctaataaacttgttgaattttattctttaaaagttgtagatgttcttgcagatgagccgcaaaaaagcaaatcagatatttggtattctttggttttagaaaatggatggatttacagaagggcaagcaaaatattgttgtttgattggaaagataaaacaagagattttattgtaacaactgatttgaatgatgatggaagtgttaaaacagacaaagaaggaaatgaaaaaagaagtttcagggcaccgggtgagaacgattggactttggtaaagaagaaaaccgagcaggaaatcgagcagtctcataaaaccgttggaatgtatatatacgaaacgctacttgctaatcctaaacaaaaaatcaaaggaaaattagttcgtacgattgaaagaaaattttacaaagaagagcttagacagatattagagaagcaaaaggagtttcatcaggaattacaaaatgatgacttatataatgattgtattcgtgagttgtacagaaacaatgaagctcaccaactgactttaagcaaaaaagattttatacatctttttataaaggatattgttttctaccaaagaccgttgagaagccagaagtcttctatttccaactgtactttggaattcagaaaatacaaagatgaaaatagagcagaacatacgcaatatttaaaagcaattccaaaatcgaatccatattatcaggaatttcgtctttggcaatggatttttaatcttaacctatataaaaaagataatgatgaaaacgttatcaaagaatttttaaccactacccaagatgtcgaaaatctgtttgagtttttaaacaatagaaaagaagttgatcaaaaaactttattgaaacattttaagctcaatgagaaaacacatcgctggaattttgtagaggataaaaaatacccctgcaacgaaacaaagacgatgatttcaacccgattgcagaaagtagaaaatatttccggggattttctgacgagggaaatcgaacaaaagatttggcatattatatattctgtcaatgataaaattgaatacgaaaaagccttaaaatcctttgcgttaaaacatcaacttgacaaaagttcttttttcgaggctttcagaaaatttccaccatttaaaagcgaatatggttccttttcggaaaaagcaattaagaaattgttgcctttaatgcgattgggtaagtattgggattatgccaatattgataagttttcaaaagacaggattcagaaaatcattaatggagaatatgatgaaaatataaaagatagggtaagagaaaaggcggtccatcttaggagtgaagatgatttccagggtttacaattgtggctggcccaatatattgtatatggaagacattcggaagcatcaataacagggaaatggaattcagctgatgacttggaagaatttttgaaagattttaaacaccacttgcttcgcaatccaattgtagagcaggtcattacagaaactttacgtgttgtaaaagatatttggctaaaatatggaaaaggagcaaaagatttcttcaatgaaattcatatagagttgggaagggaaatgaaacttccagctgacgatagaaagaaactcacaaaccagattactgaaaacgaaaatacgaatctccgcattaaagctctattaacagaaatgatgaatgatcatgctgtagaaaatgttcgtccgttttcgccccagcaacaagaaattctgaaaatttatgaggacggcgttttaaattcaggcattgaaattgaagatgaatatttaaaaataagcaaaacggcgcaaccttctccttcagatttaaaacggtataaactttggctggaacagaaatacaaatcgccttatactgggcaaattattccattaaataaattgtttacaccagaatatgaaattgaacacattattccacaaagccgatactttgatgacagttttagtaataaaattatttgtgaatcggcggttaacaaattgaaggataattatatcggacttggatttattaagcagtttggaggaactattattgaacttggtttcgggaaaagcgtaaaggtttttgatattgatgaatatgaagattttgtcaagaagcactacgccaataaccgaagtaaaagaaataagcttctcttagaagatattcctgaaaaaatgattgaacgtcagatcaatgatactcgttatatcagtaaatatatttccggtatactttctaatattgttcgcttagaagatggttcggatgaaggagtaaattctaaaaacattgttcccggaaatggaaaaattactacccaattgaaaaaagactgggggttaaatgatgtttggaatgacttgattttaccccgttttaaaagaatgaatcagctgaccaattcgacagattttaccgcctggaacgaaaattttcaaaagtttttgccgaccgttccaattgaatattccaaaggtttttctaaaaaaagaatcgaccatcgtcatcatgctttagacgctttggtaattgcttgtgctacaaaggaccacgtaaatttattaaataatcaatcggcaaaatcggaaaccaaacgctacgatttgaaaaagaaattaatgaagtttgaaagagttgtttatctccatgtgcaaacaggggagaaaatcgaaagagaagtgccaaaacaatttttaaaaccttgggaaaattttactgtagatgttaagcataatttggacacggttattgtaagttttaagcaaaaccttagggttattaataaagcaacgaattattacgaaaaatatgtagagaaggatggtgcaagaaataagactagagtagagcaaaagggaataaattgggctattagaaaaccaatgcataaagatacggtttccggtaaagtagatttaccttgggtaaaagttccaaaaggaaaaattttaacagcgacgaggaaaagccttgatgcttcattcgatttaaaatcaattgcctccattactgatacagggattcaaaaaattatcaaaaattatttaatgcttaaagatggaaaccctgaattggctttttcacccgaaggaattgaagatttgaataaaagtattgagaagtacaatgatggcaaacctcatcaacccatcaataaagtaagggtttttgaactgggtagtaaatttcagataggacaagccggaaataaaaaagataaatacgtagaagccgcaaaaggaaccaatttgttttttgcagtgtacgaagatgaaaacggcaagagaagctatgaaactattcctttgaatgaggtgattgaaaggcaaaagcacggtttacctgtggttgatttaacaagtacaaatgatttctatttatgcccgaatgatttggtttatattctatctgatgatgagcgggataatatgacaaataacgattttgaaagcctttctgacgaacaagttaaaaggatatacaaatttgttagttgtacaggaggtgaggggcattttattccttacgcaagtgcgacagaaataataaaaaatgaaaacggtacaaatagtaaaagcgagagaatgcagaatttctatgatggtagttgtatgcttgataaaaacagcaagcccattatgataaaggaaaactgtgtaaaacttaaagtcgaccgtttaggtaacatttcaaagatataa

SEQ ID NO: 39 - DNA, 3702 bp, Artificial sequence
  Cas endonuclease of Locus 21
atgggttcacgtataattcctttatcaacaagtgataaagaagaatttcaaagaggtttgtcaatcactaagaatcaaagtagaacggtaagccgtactcagagaaaagggtatgaccggaaacaattgaagaaaagtaatttaaagaaaattctaaataaatataatatcttcctttcagaagaattattaaaacttccaatgcttgatttgtggaaattgagaagtgattctgcaaacccaaatgaaaatatttcgactgaacaattgggacgaattttatatatgttgaatcaaaagcgtggctataaatctgcaagaagtgaagcaaatgccgataaaaaagatacagattatgttcaggcagtaaaagggcgctacgcacagctgaaagaaagaaatcaaacaatcggacaatattttcatgaagaattgcataatgcaaatgcaaacaattcttatttcagaataaaagaagaagtttatccgagagaagcttatatagaagagtttgatacgattattaatgctcaaaaagataaacatgattttcttacagacgaagtcgttcatcaattaagaaatgaaatcatttattttcaaagaaaactaaaatctcaaaaaggattgatcaatatttgtgaatttgaaggctttgagaaaacagtttttgacaaggacaaaaacaaacacaaagtagtgtctgtcggtccgaaagttgcgccgaaaacatctccattgtttcagctttgtcgtatttgggaagttgtaaatacaattaccttaaaaataaagaatcctgaaggaagcaaatataaatggggtgagaaaattccaaatttaattgagaaagagattttagctgattatttacttaaaaatgagagtttaagttttacgaagcttcttgaaattttagaattaaataaaaatgatatttatgtaaataagcaaatattaaaaggtataaaaggcaatgaaacttatgctgttcttcagaatattttaggagataatgaacttttaaattttgatgtttcaattattccatccaattacacttcaattttggtggacaaaaaaacgggagagatattggaagagagagcaggtctcgaattagatgcttcattagaaaaagagcctttataccagctgtggcacaccatttattccctaaaagatttagatgaatgcaaaaatgctttaattaaaaggtttggattcgatgatgagattgccgaaaagttgtctcgtatcaatttcaacaaacaagcttttagcaataaatcgaacaaatcgatgagaaaaattcttccttttctgatggaaggctacgattattctcaatcttgcagtttggcggggtacaatcattctaattcgttgacgaaagatgaaagagaacagcaggtaactttaaacagattagaacttcttcaaaaaaacagtttacgacagcctattgttgagaaaattctgaatcagatgataaatgtggtgaacgcaattcttgagcaatacggaaaaccaactgaaattagagttgagctcgcacgagaccttaagcaaagcaaagacgagcgcaacgatgccgatttacaaaattcaaaaaataaaaaactcaatgaagaaattggtaaacgattggctgaattgggactgcctgctacgaaacgatatattcaaaaatataaattcatttttccatcgcttagcaaaaatctaaaagatgctcgcgttaacaatcaatgtatttattgtggagaaacatttaatttaacggaagctttaagtggtgatgcttttgatgttgaccacattgtcccgaaagctttattgtttgatgattcacaaaccaataaagtattggttcatagaaaatgtaattcgacaaaaaccaatcaaactgcgtatgattacattgctacaaaaggtgacgaacaagttcgtatttattctgaacgaattgatgattggtttaaaagaggaattatttcttacagtaaaatgcaaagattaaaggtttcacataaggaatatcttgaaagaaaaaaaataggaaaagaaaccgaaactgataagaagctttgggaaaattttatagacagacagttgagagatactcaatatatttcccgaaaatcaagagagattctacagaaagtatgcaacaatgtaactacaacagaaggcggagttacagcaaaacttcgcaatttgtggggttgggatgatgttttgatgaatttgcaaatgccaaaatataaagaattagggcaaactgtcatcaaagaatggacaagcgaccacggaaaaagaaaacatcaaaaagaagaaatagaaaattggacaaaaagagatgaccatcgtcatcacgccattgatgctttggtaattgcctgcacaagacaaggttttattcagcggataaatactttgaattctagcgatactaaagatttaatgatgaaagaagttgaaaaagcaaaaatcgaatttaatgaaaagagtacccttttagaaaaatatttaaagactcaaaagccgtttactacagaacaagtaatgaaagaagctgataaaattttagtttcatttaaagcaggtaaaaaagtagcaacaataactaaatttaaagctacaggaaaaaataaagatacaggagtaattgttccaagaggagcgttacatgaacaaaatgtttatggtaagataaaagctattgaaaaagataagtctttaaagtatttgtttgaaaattcagggaaaattgtaaatcctaaaattaaaaatttagttgaaataagactttcggaaaatgaaaatagttcaaaaatggctttatcaacattaaagaaaaatcccattttcctaaatgaagaaaaaactgatttactagaaaaggcatcatgttatgagtatgttactgttagaaagtatcctttgaacacaataaaagcaagtcaggctgatgatattgttgatgaaagagtgaaatttttagtgaaagaaagattggcccaatttggaaataaagaaaaagaagcttttaaagatacactttggttcaacgaagaaaaacaaattccgattattaccgttcgtttatttgctcgtcctgatgctaataatttacaggcaatgaaaaaggatgaaaacggtaaagaaataggatttgtagtgttgggcaacaatcatcatatcgccatttatgaggataaagacaacaagcttgtgcagcacagttgtactttttggcatgcagtggaaaggaaaaaatataacattccaccagtaattaaaaattcctcagaaatttggaatcaattattaaataaagaattcccagaaacttttttggataaattacctgcggataatctcgaattaaaatttagtatgcaacaaaatgaaatgtttattctgggattaccacaagaagaatttgaagaagcaataaaaaataatgataaatctgttttgagtaaacacatgtatttagtttggagtattgctgacggagattattggtttagacatcatttagaaacaaaaaatacagagttaaagaaaatcaatggtgcaaaagaaagcaaaagatttttcagattgcaaagtcttaaggctgtagaaaatttgacaccaatcaaggtaagactgaatcatttaggagaaataactaaaataggagaatactaa

SEQ ID NO: 40 - DNA, 3807 bp, Artificial sequence
  Cas endonuclease of Locus 22
atgatgattaaaaatatacttggattagacttaggaaccaactcaattggttgggcattaatagaagttgatgaaaataatattcctatccgaattgttgcaatggggtctagaataattcccttgtcaacaagtgataaagaggagtttcaaagaggtttatcaattacaaagaatcaaagtagaacggtaagtcgtacccagagaaaaggttataataggaaacaattaaagaaaaatgatctaaagaaaattctaaataaatacaatatttttccatcagaagaattgttaaaacttccaatgcttgatttgtggaaattaagaagtgactctgctaatcccaatgaaaatatttctgcagaacaattaggacgtattctttatatgcttaatcagaaaagaggttataaatctgctagaagtgaggctaatgctgataaaaaagatacagactatgttcaggaggtaaaaggccgttatgctcagttgaaagagagagagcagactattgggcagtatttttatgaagggctttctaccgctttttcagacaaagataatcggcagtattttagaatcaaagaagaagtttatccaagagaagcttacgtagaagagtttgatactatcattaatgctcaaaaagataagcatgattttcttacagataaagtagttcatcaattaagaaatgaaatcatttattttcaaaggaagctgaaatctcagaaaggattagttagtatctgtgaatttgaaggttttgagaaaactgtttttgataaggaaaaaaacaaaaataaagtggtgtttattgggccgaaagtagctcctaaaacgtctccattgtttcagctttgccggatttgggaagtcgtcaatacgattactttaaaaataaaaaatccagaaggaagtaaatataaatggggtgaaaaaattccggatttaaaggagaaagaaattttagcagattatttatttaaaaacgaaagtgtaagttttagtaaacttctcgaaattttaggattaaaaaaagaaaatgtatatgtgaataagcaaatcctgaaaggtattaaaggaaacgaaacatatgcagctctttataatgttttaggcgataatgaacttttgaattttaatgtatctatcattacttcaaatcatactgcgatattgatagataagaaaacaggcgaaattcttgaagaaagagctggccttgaacttgatgcatttttggaaaaagagccgttatatcaactgtggcataccatttattccctgaaagacttagatgaatgtaaaaatgcgttaattaaaaggtttggtttcgaagaagacattgccgaaaaattatcttgtatcgattttaataaacaggctttcggtaataaatcgaataaatcgatgagaaaaattcttccttttctgatggagggctatgattattctcaatcctgcagcttggcgggctataatcattctaattctttaactaaagatgaaagagaacaacaaattactttagaccgattagaacttctttccaaaaatagtttgagacaacctattgttgagaaaattctgaaccagatgattaatgtagttaatgcaattcttgagcaatatggaaaaccatctgaaattagagttgaacttgcccgtcaacttaaacaaagtaaggacgagcgaaatgaaactgatttgcaaaactctaaaaataaaaagctcaatgaggaaattggaaaacgattagcggaattgggactgcctgtaaccaagcgttatattcaaaaatataaattcatttttccatcacttagtaaaaacctgaaagatgctcacgtcaataatcaatgtatttattgtggagaaaccttcaatttaacagaagctttgagtggggatgcttatgatgttgaccatattgtaccgaaaactttattatttgatgactcacaaaccaacaaagttttggttcatcgaaaatgtaactcgacaaaaactaatcaaactgcgtatgattacattgctacaaaaggagatgaacaggttagggtatactcagaacgggtggatgactggttcaagagaggaattatctcttacagtaaaatgcaaaggttgaaagtttcacacaaagaatatcttgaaagaaaaaaacttggaaaagaaacagagacggataagaagctttgggaaaacttcatcgacaggcagttgagagatactcaatatatttctcgcaaatcaagggaaattttgcagaaagtgtgcaataatgtaacaacaacagaaggtggagtgactgcaaaactgcgtaatgtatggggttgggatgatgttttaatgaatcttcaactgcctaaatataaagaattagggcaaactttcaccaaagaatggacaagcaaacatggaaaaagaaaacaccaaaaagaagaaatcgaaaactggacaaaaagagatgatcatcgccatcacgccattgatgctttgataatagcttgtacaaaacaaggctttattcaacgaataaatactttgaattcgagtgagacaaaagatttgatggtaaaagaagttgagggagctaaaatagaatttaatgaaaaggctacgcttttagaaaaatacttaaaaactcagaaaccttttgatacacatgaagtaatgaaagaagctgataagattttaatttcatttaaagcaggaaaaaaggtagcaacaataactaaatttaaagcaacaggaaaaaataaagagacgggggtaattgttccgagaggagctttacacgaacaatctgtttatggtaaaataaaagtaattgagaatgataaacctttaaaatacttgtttgaaaactcagataaaattgtaaatccaaaaattaagaatcttgttgaaacaaggctcacagaaaatgaaaataattttaaaaaggctttatcaacattaaagaaaaatccaatctttttcaatgaagaaaaaaccgagatattagaaaaagcatcttgctacaatgatgccactgttttgaaatataagttacaaaatataaaagcaagtcaggccgatgatattgttgatgaaagagtgaaatctttagtaaaagaaagacttgctcaatttggaaataaagaaaaagaagctttcaaggatattctttggcttaatgaagaaaaacaaattccgattataacggttcgtttgtttgcccgtccagatgcagataatttacaggctattaaaaaagataaatatgggaatgagataggattcgttgtgacgggaaataatcatcatatcgcaatttatgaagataaagacaataagcttgttcagcatacttgtacattttggcacgcaatagaaagaaaaaaatacaatattcctgctgttattggaaattcatcagatatttggaaccaattattagacaaagaacttccaatatcatttttgaataaattaccgatggataagctcaatttaaaatttagtgtgcagcaaaatgaaatgtttattctggggttatcacaagacgaatttgatgagacaattaaaaataatgataaatctttattgagtaaatatttgtatttggtttggagtattgcagaaggtgattattggtttagacaccatctggaaacaaagaacactgagttaaagaaaactgatggagcaaaggaaagtaaaagatattatcgattaagttcaaaaggttttattgacttaaatccaataaaagtcagactgaatcatttaggagaaattaccaaaataggagaataa

SEQ ID NO: 41 - DNA, 3795 bp, Artificial sequence
  Cas endonuclease of Locus 23
atgaaaaaaatattaggattggacttggggacaaatagtattggatgggctttgattgaaattgataaaaataatattcctattagcattattgcaatgggttctcgaataatacctttatcatctagtgataaagaagagtttcaaagaggtttgtcaataacaaagaatcagagtagaacggttagccgcactcaaagaaaaggatatgaccggaaacaattaaaaaaaagtgatctaaagaaaattctaaataaatacaacatttttccttcagaagaattattaaaacttccaatgcttgatttgtggaaattaaggagtgattctgctaatccaaatgaagatatttctgccgaacaactaggccgtatattgtatatgctaaatcagaaaagaggctataaatctgctagaagtgaagcgaatgctgataaaaaagataccgattatgtacaagctgtaaaaggacgttatgctcatttgaaggataggactcagactattggccaatacttctttgaagaattagacaatgcaaatactaataattcttattttagaataaaagaagaagtttatcccagggaagcttatacagaagaatttgacgccataattaatgctcaaaaaggtaaacacgactttcttaccgatgaagttgttcatcaattaaggaatgaaatcatttattttcaaagaaaactgaaatctcaaaaaggattagtgagtatttgtgaatttgaaggttttgagaaaactattttcgataaggaaaaagacaaaaataaagtggtacttgttggtccaaaagttgctccaaaaacctctcctctatttcaactttgccgtatttgggaggttgtcaatacaattacattaaaaataaaaaatccagaaggaagcaaatacaaatggggtgaaaaaattccaaatttaaaagagaaagaaattttagcagattatttgtttaaaaatgaaagcttaagttttagtaagcttcttgaaattttagaattaaaaaaagaaaatgtttatgtgaataagcaaatccttaaaggtcttaaaggaaacgaaacttattctactatccatagtattttaggagataatgaacttttaaattttgatgtgtctatcattacttcaaatcatacatcaatgttggtagacaaaaagacgggagaaattttagaagaaagagcgggtcttgaacttgatgcatcattagagagagaacccctatatcaattgtggcatacaatctattcattgaaagatttagatgaatgtaaaaatgccttaatcaaaagatttggttttgatgatgaaattgctaaaaaattatctcgtattgattttaataaacaggctttcggaaataaatcgaataaatcgatgaggaaaattctaccttttctgatggaaggctacgattattctcagtcttgcagtttggctggttataatcattctaattctttaacgaaggatgaacgagaacaactaatcactttagaccagttagcactccttcctaagaacagtctcagacaaccaattgttgagaaaattctgaatcagatgattaatgttgttaacgcaattcttgaacaatatggcaaaccctctgaaattagagttgaactcgcacgtgaacttaaacaaagtaaggacgagcgaaacgatacagatttacaaaattcaaaaaataaaaaactcaatgaggaaatcagaaaacgattggttgaactgggattacctgtaactaaacgatatattcaaaaatataaatttatttttccttctcttagtaaaaatctgaaagatgctcacgttaacaatcaatgtatttattgtggagaaacatttaacttaacggaagctttgagtggtgatgcctacgatgttgaccatattgtgccgaaagctctattatttgatgattctcagaccaataaagttttagttcacagaaaatgtaattcaacaaaagacaaattaacagcatacgattatatttctacaaaaggaatagagcaagttagagtatattctgaacgtgtggatgattggttcaaaagaggtattatttcttatagtaaaatgcaaaggttgaaagtttcacacgaagaatatctggaaagaaaaaagataggaaaagaaacagagactgataaaaaactttgggaaaacttcatcgagagacaattgagagatactcagtatatatctcgtaaagcaagagaaattttacataaattatgcaacaatgtgactacaacagaaggcggagttacagcaaaacttcgtaatttatggggttgggatgatgttttaatgaatctacaaatgcctaaatacaaagaattaggacaaaccgtcatcaaagaatgggcaagcgatcatggaaaacgaaaacaccaaaaagaagaagtcgaaaactggacaaaaagggatgaccaccgccatcacgccattgatgctttggtaattgcttgtacaaaacaaggttatattcagcggataaatactttgaattcaagtgataccagagatttgatgataaaagaagtggaagaagcgaaaatagaatttaatgaaaagtcaacacttttagaaaaatatttaaaaactcaagagccgtttactactcaagaagtgatgaaagaggctgataagattttaatttcttttaaagctggcaaaaaagtagcaacaataactaaatataaagctacaggcaaaaacaaaaatactggtgttcttgtcccaagaggagctttgcacgaacaaaacgtttatggcaaaataaaagtgattgaaaaggataaatctttaaaatacctattcgaaaattcagataaaatagtaaactctagtattaaaaaacttatagaagtaaggcttttggataatgaaaataattctaaattggctttatcctctttaaagaaaaacccgatttttctaaatgaagaaaaaaaagaagtattagaaaaagcgtcttgttatgagtatgtcactgttaaaaaatatcccttgaacacaataaaagccaaccaagctgatgatattgttgatgaaagagtgaagtttttagtaaaagaaagattatctcaatttggaaataaagaaaaagaagcttttaaagatacgctttggtttaatgaagaaaaacaaattcctattattactgttcgtttatttgctcgtccagatgcaaataatttgcaggcaataaaaaaagataagaacggtaaagaaataggatttgtagtgacgggaaacaatcatcatattgcaatttatgaagacaaagacaataaacttattcagcacagttgtacattttggcatgcagtagaaagaaaaaaatacaatgttccaaccgttattaaaaattcatctgatgtttggaatcaattattacacaaagaattaccagaatcatttttaaataaattacctgctgattatctcaatttaaaattcagtatgcaacaaaatgaaatgtttattctgggcttatcacaagaagaatttgatcaagcaattaaaaagaataataagcccttattgagtaaacatttgtatttagtctggagtatcacagatggagattacttttttagacatcatttagaaactaaaaatacagaattgaagaaaacagacggagcaaaggagggtaaaagatattttcgattaagtacaaaagggcttacagatttaaatccgataaaagttagattaaatcatttaggagaaataactaaaataggagaatattag

SEQ ID NO: 42 - DNA, 4395 bp, Artificial sequence
  Cas endonuclease of Locus 24
atggcgaaaattttaggattggatttagggacaaactcgattgggtgggcgattgttgataaagatggaaatgatttttcccttgtagataagggagtgagaatattttccgagggagtaaaatctgaaaaaggaattgaaagttctcgtgctgcggaacgaactggttatagaagcgcaagaaaaattaaataccgcagaaaattaagaaagtacgaaaccttaaaagttctttcctcaaatggaatgtgtcctttgtcggttgaagaagttgaagactggaaaaaatccgggtttaaaaaatatcctcttaatcctgaatttttgaaatggttacgaacggatgaataccaacatataaacccatactattttagagatagagcaagcaagcaaaaagttgccttatttgaattgggacgtgctttatatcatattgctcaaagaagaggttttttgagtaatcgtctagatcagtcagctgaaggagtttttgaagaacataatcctcaaatccaaagtttgattgaagatttggatgattcgaaattaattcttgatgaattgaaaaattattatgttgataaaggaataattgaagaagctgaaaaaggagtttttaaaaaagatttagatgaaggtgagaaaaaactaaaatcactttataattcgttagtaggaataattaagaagaatgaaaacaacgttgaaaaatgcaaagaggaatttattgcaaggcttaataaaaaagaagatttaggaaaagtaaaaggaaaaatcaaagatatttcgcaagcaatgcttgatggtaattttaaaactttaggacaatattttttcagtctttacaataaaggaaaaataagaaatcaatatacttcgagagaagaacattatttggaagagtttattactatttgtaaaattcagggaatcgaaggaattgatgataaagaaaaattacctgaaaagaagtttacaggcttagccaaagatttgtacaaagccattttctttcagcgtcccttaaaatctcaaaaaggactgattggaaagtgttcctttgagaaaagcaaatcacgttgtgccgtttcgcatcccgattttgaggagtacagaatgtggacttacttaaacactatcaaaattggaacacaaagcgaaaaaacattacgttttttaacgcaagatgaaaaattaaaattagttccaaaattctacagaaaaaatgattttaattttgaagttttagccaaagaacttgttgaaaaaggagcaagtttcgggttttataaatcttccaaaaagaacgattttttttattggtttaattacaaaccaactgattcggttgcagcttgtcaagtttcagcatctttaaaaaatgtgattggtgaagactggaaaacaaaaatatttacttataaaactttaaatgcaaaagaagaagaagtaacaaaatctgttgattataaagacttatggcacttactttccgtagcaacatcggatatttatttggaggaatatgctaaagataaattagggtttgacgacaaaaatgccaaagctttcagtaaaataaaactcaaaaaagatttcgctagtttgagttcatcagcgatcacgaaaattttgccttatgtaaaagaaggacttttgtattctcacgctgtttttatggcaaatattgaaaatattgttgatgaaaatatttggaataatcttgaccaaagaaattatattcagtctaaaatagccgaaattattgagggctatacttttgaaaaaacaggtttggaagtagtcaacagccttattaaagaatataaaacagaaaatgattacagcaaaaaagtatattattcaaaagaagctgaaccagaatttgaaaaagatttaaagcaaaaattagtagttttttataaatcaaatgacattgaagatgaaaatataaaacaagctatttttaatgatttatattcagttttaattgaccaacttaaaaaatatgagtatatcaaaatacaacgattggatgagaaagttttagagtttttaaaaggtgaaaatgaagacggagaagttttttgcaataatccaaagcaattaaaaaagctgtatcatccatcagatattgaaatttttaaaaagcaaaaggtcaaagataaagatggtaaagaaacgggacagcttattttaggtagccctttaacttcttcaatcaaaaatccgatggcaatgcgtgctttgcatcaattgcgtaaagttttaaatactttgattttggaaggtcaggtagatgaaagtacaaggattcatattgaaatggctcgtgagttaaacgatgccaaccgaagaaaaggaattcaggattatcaaaaagagaataaagatttcagagacaatgctattaaagaaatcaaaaaactgtatttggacgaatgtggtaaagaagtagaaccaacggaagatgatattttaagatatcagctttggattgaacaggacaaatgtgagatttacgaacaaggcaagaatattagtatttgtgatataataggaagtaatccagcttatgatatagaacatacaattccaagaagtatttcgcaagataattctcaaatgaataaaacgctatgcagtcagcgatttaacagggatgtcaaaaagcaaaaaatgccaattgaattgagcaatcatttggaaattttgccaagaattgcgcattggaaagaagaagccgacaacttatcaagggaaattgagataattagccgttccataaaagccgcatcgaccaaagaaattaaagataaaaaaatacgaagaagacattatctgactttaaaacgtgattatcttcaagggaaatacgatcgatttatttggaaagagccaaaggttgggttcaaaaacagtcaaattccggatacaggaattatcaccaaatatgcgcaagcttatttaaaatcgtattttaaaagagtagaaagtgtaaaaggcggaatggttgccgagttcagaaaacaatggggaattcaggagagttttattgacgaaaacggatttaaacaatacaaagaaaaagatagaagtaaacacacccatcataccattgatgccattactattgcttgtatgaccaaagacaaatatgatgttttggctaaagcctggacttctgaagatgaacaagataaactaaaggcaaaagctctaatggcagatgccaagccgtggaaaacctttaaagaagatttactcaaaatagaagatgaaattttagtttcacattacacgcccgataatgtaaaaaaacaatctaaaaagattattagggttcgtggcaaaaaacaatttattgcagaaattgagagagatgtcaaaggtaaagcaatacaaaaaaaagatgctaatggaaaagtagtttacaagttaaatgataaaggagaaaagatcccaagattgcagcaaggtgatactattcgaggctcgttacaccaagatagtatttatggagcaattaaaaatccattaaatactgatgaaatacgttatgtgattcgtaaagatttagaaagtctgaaagcaagtgatatcgaaaacattgtggatgaaactgtaaaagagaaagtaaaacaagccgttacaaataaagttttgttgctttcttccaatgcccaacaaaaaaataaaattgccgagaatgaaaaggtttggatgaataaagaaaaacaaatttccattaacaaagttagaatttatgccaattcagttaaaaacccactggaaataaaagagcatagtttattgtcaaaatctcgtcacgaacacaagcaaagagtatatggtcagaatgatgagaattatgcaatggcactttatgagttagatgggaaaagagaatttgaattgattaataattttaatttggctaaactcataaagaatggacaaggattttatcctttaaataaagaaaaagaattaaaaggtaaaaaagttttatatccgattgcaaaaagtaacagcagagatgttgttttgaaacgaggacaacaagttgttttttttgataaagaagttgaaaagccaaaggatatttctgaaatcttggattttaaaagaagggtttatataattgaaggtttgtccattcaaagaataaaatcggggaataatgaatttgaatatggtgtaattatgttaagatatttcaaagaagcaaggaaatcagatgaaatcaaaaaagataattttaaaccagatggtgtttttaaattaggagaaaataaaccaacaagaaaaatgaatcacagccaatttaccgcttttgttgaaggtattgattttaaagttttaccatcaggaaagtttgtcaaaatttga

SEQ ID NO: 43 - DNA, 4377 bp, Artificial sequence
  Cas endonuclease of Locus 25
atggcaaagattttaggattagatttagggacgaactcgattggttgggcgattgtagataaagacgaaaataatttttcattagtagataaaggagtcagaatattttctgaaggagttaaatctgaaaaaggaattgaaagttctcgtgctgctgaacgaacaggatttagaagtgcaaggaaaattaaatatcgaagaaagctaaggaaatacgaaactttaaaagttctgtcatcaaatggaatgtgtccactttcaattgaagaagtggaagactggaaaaaatcaggttttaaacaatatccacttaatcccgaattcctgaaatggttaagaactgatgaggctgaaaacatcaatccttatttttttagagataaagccagcaaacaaaaagttcctttgtttgaattaggacgagcattctatcatattgctcagagaagaggttttttgagtaatcgtttagatcaatctgcagaaggaattttagaggaacattgccctaaaattgaaacaattgtagaagatttgaattcttatgaagaagttttagaaaatttaaaagattactttttttttgaaactggaattcttgatgctaatgaaaaaagtggttatgcaaaagatttagatgaaggtgataaaaaattggtttctttatacaaatcacttcataccattgtaaaaaagaatgatactaattttgaaaaaggtaaagcagaaattattgaacgactcaacaaaaaagatgttttaggaaaagtaaaaggaaaaattaaagatatttctcaagctatggtcgacggaagttttaagactttagggcaatactttttcagtttatatagcaaagaaaaaattagaaatcaatatacttcaagagaagaacattatctcgaagaattcataactatttgtaaagtccaaggaatcgattccattaacgagaaagaacaattgccagagaagaaatccgatggtttagccaaagatttatacaaagccatattctttcaaagaccattaaaatctcaaaaaggattgattggtaaatgttcttttgaaaagagtaaatcccgctgttccgtttcgcatcctgattttgaagaatacagaatgtggaattacattaatacaattaaaattggaacacaaagcgaaaaaacattgcgatttcttacgcaagaagaaaagttaaaattagttccaaaattctacagaaaaaacgattttaattttgaagttttagccaaagaattaattgaaaaagggacgagctttggattttataaatcttctaaaaagaacgattatttttattggttcaattttaaaccaaccgattcggtttctgcttgtcaggtttctgcatcattaaaaaatattattggagaagattggaaaacaaaaacattcacttaccaaactttaaatgttaaaaaagaagaagttacaaaaacagttgattataaagatttatggcacttactttcagtagcgacttctgatatttatttgaataaatatgcaaaagataaattaggttttgaggataaaaacgcaaaagcattcagtaaaatcaagttaaaaaaagattttggaaatttaagtttgtcggcaattactaaaattctgccttacataaaagaaggattgctctattctcacgctgtttttatggcaaatatagaaaacattgttgatgaggaaatttggaaagatgaacatcaaagaaaatatattcaaacccaaatagcagaaattgttgaaaattatacttttgagaaaagtcaattagaggtaattaatggacttataaaagatagtaaactaaaagaagaatattattctaaagaagcagaatcaatttataaaaaagatttagctactaaattagttttgttttttaaatacaatgttattgaaaatgaatcagaccaaaaaatcatttttgaaaacttatttccaatttttattgagcaattaaaaaaatatgagttcatcaaaatccagagattagatgaaaaagttttagaatttcttaaaggagaaaatcaagatggtgaaatattttgcagcaatccaaaacaattaaaaaaactctatcatccatcggatattgaagtttttaaaaagaaaatcattaaagacgaatttgggaatgaaaaagtagttttaggtactcctttaacatctgctattaaaaacccaatggcaatgagggctttgcatcaattacgtaaagttttaaatactttgattttagaaggtctagtagatgaaaatacactaattcatattgaaatggctcgcgaattaaacgatgctaacaaacgaaaaggaattcaggattatcaaaacgaaaacaaaaagttcagagaagatgcaataaaagaaatcaaaaaactttatttggatgaatgcaaaaaagaagtagaacccacagaagatgatattttaagataccaattgtggattgaacaaaacagacaagagatttacgaacaaggaaaaaatattagtatttgtgatataattggaagtaaccctgcttatgatattgaacatacaattccaagaagccgctctcaagacaattctcagatgaataaaaccttgtgtagtcaacgatttaatagagaaattaaaggaaataaaatgccaattgaattgaataatcatttggaaatcttgccaagaattgcgcattggaaagaagaagccagtaatttatcaagagaaattgaaattataagtcgttccataaaagccgctgcaaccaaagaagtaaaagataaaaaaataagaaggagacattatctaacattaaagcgagattatcttcaaggaaaatatgaccgatttattttggaagaaccaagagttggatttaaaaacagtcaaattcctgatacgggaattattactaaatattctcaggcttacttaaaatcgtattttaaaagagtcgaaagcgtaaaaggcggcatggttgccgaatttagaaagcagtggggaattcaagaaagttttattgacgaaaatggatttaagcattataaaataaaagacagaagcaagcatacacatcacacaattgatgccataacaattgcttgtatgaccaaagataaatatgacgttttggctcacgcttgggcattagaagatgaacaaaataaaaaagaagccaaagctattatagaaaaagctaaaccttggaaaacctttaaagaagatttgttaaaaatcgaagaagaaattttagtctcacattatacacccgacaatgtaaaaaaacaatctaagaaagttattagaattcggggtaaaaaacaacacgttgccgaaattgaaagagatgaaaaaggaaaggcaattcctaaaaaagatgctaacggtaaaattctttacaagttagataaagaaggaaaaaaacttccaagatatcaacaaggcgatgccattagaggttctttgcatcaggatagtatttatggagcaattaaaaaccctttaaatacggaagaaattcgttatgttattcgtaaagatttagaaagtttaaaagcatctgatattgaaaatattgttgatgaaactgtaaaagaaaaaattaaagaagcagttgcaaataaagtcttgttattttcttcaaatgcccaacaaaagaataaaattagagagaatgaaaaggtttggatgaacgaagaaaagcaagttccaataaacaaagttagaatttatgctaattctgtaaaaaatcctttggaggtaaaagaacatagtttattgtcgaaatcacgtcatgagcataaacaaaaggtatatgggcaaaatgatgagaattattgtatggcaatttatgaattagaaggcaaaagggaatttgaattaattaataattttaatttagcaaagttgattaagggaggacaaggattttatcctttttataaagaaaaggaggtaaaaggaaaagtagttcaagttcctattgctaaaaggaatggtagagatttaattttaaaaagagggcaacaagtaattttttatgataaagatgttgaaaatcccgatgatgtttttgatttagtggatttaaaaggaagaatttatattattgaaggattgtcgattcaacgccaagttgtttctggaaagctttatgagtttggtagtattatgtttcgttattttaaggaagccagaaaagcagatgagattaaaaaagatagttttaaacccgatggtacttttaaatcaggagaaataaaaccgactcgtaaaatgaatcataatcaatttaccgcttttgtagaaggaattgattttaaagttttgccatcaggtaagtttattaaaatttaa

SEQ ID NO: 44 - DNA, 3384 bp, Artificial sequence
  Cas endonuclease of Locus 26
atggcaaagattttaggattagatttaggaactaactcgataggttgggcattaattgacgataaattaaataaaattttagggattggaagtagaatttttccaatgggggttgaaaatcttggtgatggcgataacgaaatgtctaagaatgcaagtcgaacaggagcaagaggagttcgacgtcagttttttagacgaagactaagaaagaaagtgttactaaaatcactttctgaaaataatatgtgtccaataaacaccaaagattttgaagattggaaacaaactaaacagttccctaatgaaaaattagcaacttggtttgctatgaatccttatgaattgcgtcaaaaagcattgacggaaaaattatctttagaagaaataggtagaattttttatcatctaattcaaagaagaggatttttaagtaatagtagaaaaggaggaagcgatgatggagctatttttaaaggaaatgctaaagaaggaaaaataggaattgattatactttagaaagtatcgaaggaaaaacattgggttcatatttatatgagatttatccaaaagaaaatcagccttttcaatatggactagaaagaatcagaaacagatatacaactcgtagaatgtatattgacgaatttgaaatgatttggaataaacagtcagaatttcattcggttttgaattatgatttaaaaacaattttagggggtagaaaacaagataattacacagaagacggtattttattttatcaaagacctttgcgttctcaaaaacatttagttggaaactgttcttttgagcctttaaaaactaaatgccctataagtgctattcctgtagaaatgtttagaatttggcaatgggttaatacagttgaatataatgggaagaaaatatctgaagaagaaaaaaccaaactagttgagcaattgctttcattcgataaaattgaatttaaaaaactccgaaaagctattgggaaagaaagtgcggagtttaagtttaattacaaagacgatgataaaattgctggtacacatactatctctaatttatccaatagaaaattctttggcaaaagatggtttgatttttcagataaagagcaagaagatatttggcatgttctgtatttttttgatagcaaatcaaacctaaaagaatatgctgttaagaattggaattttagtgaagaacaagcaattgcaatttcaaggtttaatgtaaaagacggctatgctagtttgagtcgaaaagctattggaaatattttgccttttttgcagcaagggtatacttatgatattgcagttgttatgggcggaattaaaaatgcttttggtgacaaatggcaaaatgacacagtagaaaataagctaaaacaactagatttgattgataatattgaaggtatagttaggtctaaaatttcaggaggatttatagatacaattaaggatttattacgtaaagaatttgaatttaatgacaaacaattaaaaaaactttaccatcattctgctgcaattgatacggtagcattattacgaaaactgccaactgggaaacaggcagataaggatattcaagctattagaaatccaattgtaattacagctttattcgaattacgaaaattggtcaatgaattaatcgaagagcatgggcagcttgacgaaataaaagtagaaatggcccgtgacctgaaaatatcaaaatcgcagcgaaataagatacgcaaagatcaaaaacgattggagagagaaaatgacagagtaaaaaaggaagtagaaaagtatgtaagagtttctcatgataacattctaagatttaagctttgggaggaatgcaagcagacttgtccttatacaggtgttgtaattccagtcacaaaactttttacaggggaaatacaaatagagcatatccatccttggagtcgttcgttaaacgatagtttcaataataaaacattgtgctatgcggatgaaaatagacgaaaaggagacaaaacaccttttgaattttatggaagcgatgagctggattggattgctagaaaagaacgtgctttaaaattgttttctgatactaaagagtatcccaatgcctatcaaaaattcaagcgatttgtacagcaaaaatttgacgatgatttttcttcaagacaattaaatgatacacgatttataagtaaagaagcatcgtcttatttaaaacaaatatgtgaaaaggtaaatgtttctccaggtcaaatgacagctaacttacgtcaaaaatggggtttgaatacggttttgaatgatgaaaatgctaaaactcgggaagaccatcgtcatcatgctattgatgctttggttatggcatgtgggaagacaagttatttacaggaattgtcaaaatggaatcgttacaatagaaattatgatttaaaagattttcctatgccttgggaaactttccgatttgatgctgagaaagcaattgataaaatattgatttcgcataaacgtatttctaatgatattacaactcgatatactaaagtggaaaaaaacggaaagacatatataaataagggagttgcagcacgagggcaattgcataaggaaactgtttttggtaaacgaaattttaatggagatgaagcatttcatgttaggaaatcaattgatagtttaacaactgagaaacaattagaaaaagtggttgatgaagttattaaaaaattaattcataagaagattaaggaattgggaggattcgtaaaaggtactatccctgctaatacttttttcaatgttgatgaaaatggagttaaacaaccacaaattttcctgccaaataaaaatggtagtccagttccaattttaaaagtccgaatgaaagaaaatattagtggagctgaaaaattaaaagacaatgtcaatcaatgggtaaaccctagaaataatcatcacgtacttatttataaggatgaaaaaggaattttaagggaagaagtggtgactttctggactgttgttgaaagaaaaagtaaaggatttccagtgtatcaattaccagttgaaggaaaagagatagtgacagctttgcatattaatgatatgtttttgttaggattaaatgaagaagaaatcaattgggagaatccagattatgagattctaagagatagtttatatagagttcaaagtttgtcttcaaaatattatgagtttaggcagtctattaatgcagaatctcaaaataaaatttcacctatttatgaacaaattagaggatttggttcgggtaaaaccggttgggattcttttaatccaataaaagtaaaaatttcagtttcaggaaaaatttcaaaaatataa

SEQ ID NO: 45 - DNA, 3327 bp, Artificial sequence
  Cas endonuclease of Locus 27
atggcatacaaattaggaatagatctgggcaccgcgtccattggtgctgtcgccatccgcatcgaaaacaacgaaccacaaagcattgactggcatgcagtacgcatttacagcgaaccagttgtaaacactccgaaagggctgcaacccaaaaaggcggcccgccgtgacgcacggcaattgcgcaaacagattgaaaggcgagcacgacggttgcgccgcattgccaatctgattccattgctgggattgcataaagccgaagtgaaaccggggcgccgtcaggatttgaccacattgcgcgccatcgcagcgcgccagcaggtcgagctaaacgagtttgccctagtactgctgcgtctggccaaacgccgtggttacgccggtggatttcgcgattccaaagacggtgtagtcaagagctccagcgacaaactgagcgaggaaatgagacgtcttgccgagacgcaaaacctgcaggaaataactctgggtgaatacctgctgtacagacaggaacacggactgcctgtctggctcaaagccgaacgtccaggtctggaaccgcgctatgccctgcgcgaaatggtaaccgccgagttcgaacagctctggacaacccaggcccgataccacccgatcctggcctctaatcatctcggcaagccacttaagcaatggttcaatgaagcgctgttctaccagcggccactgaagtctcccgcccacatggtcggcaattgcctgcttgagcccaatctgccacgtgccccacgcgctcacatggcagcccaacacttcagaatcgataaaacgctccatgacatgcgctggggtagtgggcgacgggctgaacgcctgagcaaggcacaactcaacgtgctgcgtcagatgctgaatgatccagccaatgccgatggcaaggtcagcttcaaacacctgtatcaagctttgagcgagacagggttgagcgatccacgaagtcgcactttgaatctggagcgcagcagctgtgatcaactgtccggtaacaacacggttgctcgttggcgtgcgttgggactgtacgaccaatggctgacgctagcccctcgcgaccagacaaccatcatcaacttgctggcggacttgggcgggccggaactgctggttccggacgactggcaccagaacatccgcaagagcagcgccaaagctggcgataccaacctttatcgtcgattccggcccgaggtcgttgatttcatcaatgcgcttcgcgagtgcaaggacaacaatgggcagccagttttcaatcggctgacatctatgaagttcgagggcggacgcagcagctattccgtcaaggccttggaaaaattgaatacctggttcaatgatccttggtggcccgacgaaggctcaggggccgagcgtggtgacgaaatcgatgaagacgcagcactacgggtctgctatccacatctttttacgcagccccaagagctgctccaacgactcgaggccgctccgaccacgggcaacgacgtggttgacggagccttgcgcgaattacgcaaggtcatcaaccaatgcattgacgctttgggtgagaggccagaggaaatcgtcgtcgaaatggcacgagagatcggcaagggcgtcgtttggcggaaagagcaggaaaaccgcatacggcagaatgaactcgcccgaaggaaaattgccagcgaactggaaaagcacggactgagcgccaacaacacccggatactgcgctatcaactctgggaagagcaggatttgcactggtgcccctactgcgcccatcccattaatctggaagcagccacctcgggcatgacacacatagagcacgtcctgccacgctcgctcacccagatcgggcgcaaacgcagcgaactggtgctggcccacgccggttgcaacaacctgaaagccgatcagacaccttggcaagcatttggccatgatgtcgagcgctggtctgcagtagaacgcgctgccgcccgttttcaagagctgggcaagaagtcttacgccaaggaccgcatcaaggcgatgggcttctaccgcaaggcggaacttctcctgctgaaggattacgaaagcgaagtactgagcgacgaatccatagccgacttcgccgaccgccagttacatcagacctcctggatcgccaaggctgcagcccagtggttgcgcaccatcaccccgctggtttccgtctctcgcggtgaattcaccgccctactacgccatcaatggcgactcgacaccgtgatcgcagaagcgcgccttgatgaaaaacttcctgttctggatatcgatgcgtgccccgtatctccggaagcattccagcagttccggaaacaatgggaagggcatccaccagacaacctggccgaacggaccgagcgcaaactggaaaaacgcctcgaccatcgccaccacggcatagatgccttggtcatcgcgctcaccagccgaagcctctacatgtctctggcccggcgctacgttgaagaaagcgaaaggcgcgcccgcggcgagagagtccggcatgattggtccatcgagccgactatgcacaatctgcgcaaccaagcgctgggtatggtccgtacttgcaacctgacccacaagcctgaccgcaacccagccggccgactattcaaggacaccgcctatggcgtccactttccagaggagggcgatcgggtacagctgacgctgcgcaaacctttgaccagcctggccgacgaaaagtctgccgagaagactcgcaagaacctgcacagcattgccagcagtgaggtacgcctactcgttctgaaagcattcgaagcgcgcctcagtgtcgggcagaatccgaaacaggcgctctccgaaccggtaccctaccccgcctatggcaccgcaatctggcgagtccgctgcatgcaaggctacgcggacgatgccgtccgtattgtccataaaagccgtcagggcgaacacgaaaagcacctgctcaacgatggctatgcctgcttggaaataaccgctggggaaaatggcaaacaccaagtacgccttgtcactcagcgtgaagcacaaggccgcggcttcatggataaccggcagcaggcgaaacgcatattcaagggagatacggtgatcgaccggcgcgacgaccgtaaatacctagtgggctacttcaaggccgagggctatattttcctcctcccccacacggacacccgcaacttcgacaagatcaaggaggcggactcgggcaagaagaaagtttccttcaaccaagcgtaccaacttgagcgcatctag

SEQ ID NO: 46 - DNA, 3327 bp, Artificial sequence
  Cas endonuclease of Locus 28
atggcatacaaattaggtatcgatctgggcaccgcttccatcggtgcggttgccattcgtattgaaaataaggtgcctatcagcgttgactggcatgcagtgcgcattttcagcgagcccgtcgtaaacactcagaaagggctcacgcccaaaaagacggcccgtcgtgaagcccggcaattgcgtaaacaggtcgaacgacgagcccgacggttgcgccgtattgccaatctgattccattgctggggttgcagaaagccgaagtaaagcttgggcgccgtcaggacttgaccacgttgcgagctattgccgcgcgcgagaaggtcgaactacatgagtttgccctggtactgctgcgtattgccaaacgccgcggttacgccggtggatttcgcgattccgaaggcggcgtggtcaagactgccagtgacaaactgagcgtggaaatgagagctcttgccgagacgcgaggcctgcaacagataactctgggcgaatacttactgcatcgacagcaacgagggctgcctatctggctcaaagctgagcgtccaggcttggaaccgctctatgctctgcgggagatggtaaccgccgaattcgaacaaatctggacaatccaagccaaatgccatccgatcctgaacagctgtcatctcgaaaaaccacttaagcaatggttctatcaagcactgttctatcagcgaccactgaaatctcccgcccacatggtcggcaattgcctgcttgaacccaatttgccacgcgccccacgcgctcaaatggcagcccaacgcttcaggatagaaaaaacgcttcacgatttacgctggggtggcggacgacaggctgaacgcctgaacacagcgcaactcgacctactgcgtcagactctgagcgatccaaccaatgttgatagcaaggtcagctttaagcgcctgtaccaagccctgaacgaggctgggttgaacgatccgcgaaatcgcacattaaacctggagcgcagcagtcgcgatcagttacttggcaatagcaccgttgcccgttggcgcgcgctgggcctgcaagatcaatggctgatgctggctcctcgcgaccagacatctgttatcaacctgctggcagacttgggtggtccggaaatactgaccccagacgactggcaccagaacatccgtaaaagcagtgccaaggacgacaacaccaaagcctatcgtcgattccggcaggaagttattgatttcatcgatgcgcttcgccggtgcatagatagtaatggccagccggttttcaatcgtctttccgctatgaagttcgacggcggacgcagtagctactcggtaaaggccttggaaaagatgaacgaatggttcaataacccgtggtggcccaatgaaggtccaggctcagagcgtcgcggcgagatcgacgaagaagtggcgatacgggtgtgttacccacatctttatacgcaatctcaagagctgcacccgcgactcgaagccgctccgaccaccggcaacgacgttgtcgatggagcattacgcgaactgcgcaaggtcatcaaccaatgcattgacgagcaaggtgagaaaccacaggaaatcatcatcgaattggcaagagaggtcgggaaaggtgtggctttgcggaatgaacaggaaagtcgcattcggaacaacgaactcgccaggcggaaaattgccagcgaacttgaagggcacggtttgattgccagcagcacccggatactgcgatatcaactctgggaggagcaagagcgacactggtgtccttattgcgcacttcccatcagcctggaagcagccatctcaaacatgacgcacatagaacacgtcctgccccgttcgctcacccaagtcggtcgaaaacgcagtgaactggtgctagcccatgctggttgcaatcatctgaaagccgaccagacgccttggcaagccttcggccacgatgccgagcgctggtctgcagtagaacgtgctgccgcccgatttcaggagctgggtaaaaagtgctatttcaaagacagggcgaaggcgatgggttgcttccgaaaatcagcccttctcatgctgaaggattatgaaagtgaagtattaaacgacgaatccatagccggattcgccaaccgtcagttacaccagacatcttggattgccaaggttgcagcccaatggttacgtacgatttcaccgctgatatccgtttcccgcggcgaattcaccgccctgctgcgccatcaatggcgactagacaccgttatcgcagaaacgcgctatggtgaaaaacttcccgttctggatatcgatggcaatcccgtccatccggaagaatttcagcacttccggaaacaatgggaaggacatccaccggacaaccccgccgaaagaaccgagcgcaaactggaaaagcgcttcgaccaccgccaccatggcattgatgccctggtcatcgcgctcaccagccgtagtttgtacatgtctcttgctcggcgctatgtagaagaaagcaaaaagcgcgcccgcggcgagaaagtccggcgtgactggtccattgagccacctatgcacaatttgcgcggccaagctctggatatgatccgcgcgtgcaacctgaccctcaagcccgaccgcaacgctgccggccgactgtttgaggactacgcctatggcgtccacttttctgacgcaagcgagcgggcacagcttacgcggcgcaaaacattgatagatcttgcagacgaaaagtccgcagagaagactcgcaaaaatctccagagcatcgcaagccctgaggtacgccagatcgttgtggaagcgctccaaatgcgcctaagtgccgggcaaaatccgaaacaggcgctctccaaacccgtactctaccccgcttacggtacagaaatttggagggtccgttgcttacaaggctacgcggaccatgccgtgcgaatcgttcacaatagccgccagggtgaacacgaaaagtgtctgctcaacgatggctatgcctgcctggagataagggccggggaaaatggcaaacaccaagcacgtctcgtcactcagcgggaagcacagggtcgtgacttcatggaaacccagcagcaggcgaagcgcctattcaagggagatacggtgatcgacaggcgcgatgatcgtaaataccgagtgggttatttcaccgccgagggcaatattttcctcatccccttcgaggacactcgtaatttcgataaaatcaatgagcggaactcgggcaagaaaaaggtttccttcaaccaagcgcatcgacttgagcgagtatga

SEQ ID NO: 47 - protein, 1093 aa, Bacillus cereus
MAYTMGIDVGIASCGWAIVDLERQRIIDLGVRTFEKAENPKNGEALAVPRREARSSRRRLRRKKHRIERLKHMFIRNGLAVDIQHLEQQTLRSQNEIDVWQLRVDGLDRMLTQKEWLRVLIHLAQRRGFQSNRKTDGSSEDGQVLVNVTENDRLMEEKDYRTVAEMMVKDEKFSDHKRNKNGNYHGVVSRASLLVEIHTLFESQRQHHNFLASKDFELEYVNIWSSQRPVATKDQIEKMIGTCTFLPKEKRTPKASWHFQYFMLLQTINHIRITNIQGTRSLNKEEIEQVVNMALTKSKVSYHDIRKVLDLSEEYQFVGLDYGKENEKKKVESKETIIKLDDYHKLNKIFNEVELAKGEAWKAVDYDTVAYALTFFKDDEDIRDYLQNKYKDSKNRLVKNVANKEYTNELVEKVSTLSFRKVGHLSLKALRKIIPFLEQGMTYDKACQAAGFNFQGISKKKRSVVLPVIDQISNPVVNRALTQTRKVINALIKKYGSPETIHIETARELSKRFDERKNITKDYKENRDKNERAKKHLSELGIINPTGLDIVKYKLWCEQQGRCMYSNQPISFERLRESGYTEVDHIIPYSRSMNDSYNNRVLVMTRENREKSNQTPYEYMGNDTQRWDEFEQRVTTNPQIKKEKRQNLLLKGFTNRRELEMLERNLNDTRYITKYLSHFISTNLEFSPSDKKKKVVNTSGRITSHLRSRWGLEKNREQNDLHHAMDAVVIAVTSDSFIQQVTNYYKRKERRELNRDDKFPLPWKFFREEVIARLSPNPKEQIEALPNHFYSEDELADLQPIFVSRMPKRSITGEAHQAQFRRVVGKTKEGKNITAKKTALVDISYDKNGDFNMYGRETDPATYEAIKERYLEFGGNAKKAFSTDLHKPKKDGTKGPLIKSVRIMENKTLVHPVNKGKGVVYNSSIVRTDVFQRKEKYYLLPVYVTDVTKGKLPNKVIVAKKGYDDWIEVDDSFTFLYSLYPNDLIFIRQNPKKKISLKKRIESHSISDSKEVQEILAYYKGVDSSTAAIEFITHDGSYYAKGVGVQNLDCFEKYQVDTLGNYSKVKGEKRLELETSDNNDKGKDVNSIKSTSR

SEQ ID NO: 48 - protein, 1092 aa, Brevibacillus laterosporus
MAYTMGLDVGIASCGWAIVDIERQRIIDVGVRIFEKAENPKNGEALAVPRREARSSRRRLRRKKHRIERLKHMFIRNRLAVDIQHLEQTLRSQNEIDVWQLRVDGLDRVLTQKEWLRVLIHLAQRRGFQSNRKTDGLNEDGQVLVNVSENERLMEKKDYRTVAEMMVKDGKFSDHKRNKNGNYHGVVSRASILVEIHALFESQRQHHNFFASKDFELEYVNIWSSQRPVATKDQIEKMIGTCTFLPKEKRAPKASWHFQYFMLLQTINHIRITYLQVTRSLNKEEIEQVVNMALTKSKVSYHDIRKILDLSEEYQFVGLDYGKEDEKKKVESKETIIKLDDYHKLNKIFNEVEFAKGETWEAVDYDTVAYALTFFKDDEDIRDYLQNKYKDSKNRLVKNLANKEYTNELIEKVSTLSFRKVGHLSLKALRKIIPFLEQGMTYDKACQAAGFDFQGISKKKRYVVLPVIDQISNPVVNRALTQTRKVINALIKKYGSPETIHIETARELSKTFDERKNITKDYKENRDKNEHAKKHLSELGIINPTGLDIVKYKLWCEQQGRCMYSNRPISFERLKESGYTEVDHIIPYSRSMNDSYNNRVLVMTRENREKGNQTPFEYMGNDTQRWYEFEQRVTTNPQIKKEKRQNLLLKGFTNRRELEMLERNLNDTRYITKYLSHFISTNLEFSPSDKKKKVVNTSGRITSHLRSRWGLEKNREQNDLHHAMDAVVIAVTSDSFIQQVTNYYKRKERRELNGDDKFPLPWKFFREEVIARLSPNPKEQIEALPNHFYSEDELADLQPIFVSRMPKRSITGEAHQAQFRRVVGRTKEGKNITAKKTALVDIGYDKNGDFNMYGKETDPATYEAIKQRYLEFGGNAKKAFSMDLHKPKKDGANGPLIKSVRIMDNKTLVHPVNKGKGVVYNSSIVRTDVYQRKEKYYLLPVYVTDVTKAKLPNKVIVAKKGYDDWIEVDDSFTFLFSLYPNDLIFVRQNQKKKISLKKRIESHFISDSKKVQEILAYYKGVDSASATIEFITHDGSYYAKSVGVQNLDCFEKYQVDILGDYSKVKGEKRLELETSDSNHKGKDVNSIKSTSR

SEQ ID NO: 49 - protein, 1070 aa, Artificial sequence
  Cas-Locus 8
MRELDYRIGLDIGTNSIGWGVIELSWNKDREQYEKARIVDKGVRMFDKAEIPKTGASLAEPRRIARSSRRRLNRKSQRKKDIRNLLVQHEIISQKELASLYPLSKSSMDIWDIRLDGLDRLLDRFEWARLLIHLAQKRGFKSNRKSELKDVETGKVLSSIQANEKRLSLYRTVGEMWMKNMDFSKYGKRRNSPNEYVFSVSRADLEKEIVTLFEAQRKFHSSYASVDLQKTYLRIWAHQLPFASGNAIVNKVGYCSLLKGKEKRVPKATYTFQYFNTLDQINRTRLGPDFQPFTKEQRDIILDKMFQRTDYYKKKTIPEVTYYDIRKWLALDETIQFKGLTYDPNEELKKIELKPFINLKPFYEIKKVVTNYAQKTNEVFSTLDYDTVAYALTVYKTDKDIRSYLKRSNNLSKRCYDDQLIEELLTLSYTKFGHLSFKAINHVLPIMQEGRTYQEAINQLGYDTTNLKKENRSMFLPLIPDEITNPIVKRALTQARKVVNAIIRRYGSPNSVHIELARELSKSHDERKKIMTAHDENYKKNKGAISILIENGILNPTGYDIVRYKLWKEQGERCAYSLKKIPANTFFNELKKERSGPPVLEVDHILPYSQSFIDSYHNKVLVYGDENQKKGNRIPYTFFSEENKEWESFESYVRSNSFFSKKKRGYLLKKAYLPRESNLIKERHLNDTRYASSYLKNFIEKNLKFKEAEGITRKKHVQTVNGVITAHLRKRWGLEKDRQETYLHHAMDAIIVACTDHHMVTKVTEYYQIKESNKSIKKPYFPLPWMGFREEILSHLESQPIARKISEELKIGYQSSDYILVSRMPKRSVTGSAHDQTVMKKGGIDKKGKTIIIKRVHLKDIKFDENGDFKMVGKEQDLATYEAIKQRYLEYGKESKKAFETPLYKPSKKGKGNLIKKIKVEVQTKSFVREVNGGVAQNGDLVRIDLFEKDNRYYMVPIYVVDTVRSELPNKAVKSSKGYEQWLTIDNSFTFKFSLYSYDLVRLVKGDEDRFLYFSTLDINSDRLNFKDVNKPSKQAEYRYSLKTIENLEKYEVGVLGDLRLVRQETRKIF

SEQ ID NO: 50 - protein, 1081 aa, Bacillus cereus
MKYVLGLDIGIASCGWAVINQEKHRIEDLGVRIFDKAEHPKDGKSLAAPRRESRSTRKTLRRKKHRMQRIKVLLVKYGLLSTTEIENLYESASEIDVWNLRLDALERKLNQKEFARVLIHLAKRRGFKSNMKETILSENGQILESISENQKIMEQQNYRTVGEMIVKDNKFENHKRNKDGTYIGTVTRQQLQDEIHMIFNAQRLFINDLATEEFESSYLEIWASQRPYASKDQIEKMIGYCTLEPKEKRVPKASWSFQYFVALQTINNLRLISKDRIEELSFEEKKQIMNLALEKPIVKYIDIRKLLSISNELHFNNLLYSADTVDTTVENKKCIELKEYHSINKVYKQIYGKNALNLLPIDYDTIAYGLTIFKDDKDILEYLQNKYINTKGKTISNLTKKTYDDTFIQALLTLNFTKMGHLSFKALKNIIPFLEEGMSYDKACDKAGYNFKGTSFTKKTKYLPVIPQNTNPVVHRALSQTRKVINAIINKYGSPVSIHIETARELSKTFQERKEIDSMYQDNSKKNEHAINKLKELGNINPSGINIVKFKLWKEQDGRCMYSGEYIEPHRLFEEGYTEVDHILPYSRSLDDSYNNKTLALGIENQRKGNKTPYEYMGNTSIWYKFETRVQSNKKINKKKQQKLLLQYFSHAREQEFIERNLNDTRYATIYISAFIQQHLIFSESFSKKRVHTVSGIITSHVRSRWGFNKDRKESHIHHALDAVIVAVTSDQMIQRVTNYYKLKELNRKLQAKGILFPEPWEGFRLELEARISPNTQQYLKGICSKNYADINLSEIKPIFVSRMPKRSITGELHQETIRKFIGYNEKGKVLTAIKTKLEDIPFDANGDFPMYGKETDLYTYNAIKERYLSHKKDKRKSFQESLYKPTKTGEIGPLIKSIKIIDTRTIVNPVNQGKGVVYNSKIARTDVFKKDDKYYLIPIYTIDLMKNVLPQKAITAGKGYEDWITIDHSFTFLFSLFPNDLIKIVPSKNKEIKARSTSSKKEILLPSLTGYFKKVHSGTAGITVESHDGRFIADIGSKQLLLFEKHQVDVLGHYTKIKEEKRIGMSTCNDNKKSSAFGSL

SEQ ID NO: 51 - protein, 1378 aa, Lactobacillus fermentum
MKEYHIGLDIGTSSIGWAVTDSQFKLMRIKGKTAIGVRLFEEGKTAAERRTFRTTRRRLKRRKWRLHYLDKIFAPHLQEVDENFLRRLKQSNIHPEDPAKNQAFIGKLLFPDLLKKNERGYPTLIKMRDELPVEQRAHYPVTNIYKLREAMINEDRQFDLREVYLAVHHIVKYRGHFLNNASVDKFKVGRIDFDKSFNVLNEAYEELQNGEGSFTIEPSKVEKIGQLLLDTKMRKLDRQKAVAKLLEVKVADKEETKRNKQIATAMSKLVLGYKADFATVAMANGNEWKIDLSSETSEDEIEKFREELSDAQNDILTEITSLFSQIMLNEIVPNGMSISESMMDRYWMHERQLAEVKEYLATQPASARKDFDQVYNKYIGQAPKEKGFDLEKGLKKILSKKENWKEIDELLKAGDFLPKQRTSANGVIPHQMHQQELDRIIEKQAKYYPWLATENPATGERDRHQAKYELDQLVSFRIPYYVGPLVTPEVQKATSGAKFAWAKRKEDGEITPWNLWDKIDRAESAEAFIKRMTVKDTYLLNEDVLPANSLLYQKYNVLNELNNVRVNGRRLSVGIKQDIYTELFKKKKTVKAGDVASLVMAKTRGVNKPSVEGLSDPKKFNSNLATYLDLKSIVGDKVDDNRYQMDLENIIEWRSVFEDGEIFADKLTEVEWLTDEQRSALVKKRYKGWGRLSKKLLTGIVDENGQRIIDLMWNTDQNFMQIVNQPVFKEQIDQLNQKAITNDGMTLRERVESVLDDAYTSPQNKKAIWQVVRVVEDIVKAVGNAPKSISIEFARNEGNKGEITRSRRTQLQKLFEDQAHELVKDTSLTEELEKAPDLSDRYYFYFTQGGKDMYTGDPINFDEISTKYDIDHILPQSFVKDDSLDNRVLVSRAENNKKSDRVPAKLYAAKMKPYWNQLLKQGLITQRKFENLTMDVDQNIKYRSLGFVKRQLVETRQVIKLTANILGSMYQEAGTDIIETRAGLTKQLREEFDLPKVREVNDYHHAVDAYLTTFAGQYLNRRYPKLRSFFVYGEYMKFKHGSDLKLRNFNFFHELMEGDKSQGKVVDQQTGELITTRDEVAKSFDRLLNMKYMLVSKEVHDRSDQLYGATIVTAKESGKLTSPIEIKKNRPVDLYGAYTNGTSAFMTIIKFTGNKPKYKVIGVPTTSAVGLKRVGKPGSESYNQELHRIIKSNPKVKKDFEIVVPHVSYSQLIVDGDCKFTLASDTYQHPATQLVLSKESMEIIADDFKFVKENPATADEQLVRVFDEIVNQMNHYFTIFDQRSNRQKVTKARDKFVSLPTESEYEGAKKTQVGKTEVITNLLMGLHANAAQGDLKVLGLSTFGFFQSSGGLNLSEDAMIVYQSPTGLFERRICLKDI

SEQ ID NO: 52 - protein, 1337 aa, Enterococcus faecalis
MKKDYVIGLDIGTNSVGWAVMTEDYQLVKKKMPIYGNTEKKKIKKNFWGVRLFEEGHTAEDRRLKRTARRRISRRRNRLRYLQAFFEEAMTALDENFFARLQESFLVPEDKKWHRHPIFAKLEDEVAYHETYPTIYHLRKKLADSSEQADLRLIYLALAYIVKYRGHFLIEGKLSTENISVKEKFQQFMIIYNQTFVNGEGRLVSAPLPESVLIEEELTEKASRTKKSEKVLQQFPQEKANGLFGQFLKLMVGNKADFKKVFGLEEEAKITYASESYEEDLEGILAKVGDEYSDVFLAAKNVYDAVELSTILADSDKKSYAKLSSSMIVRFTEHQEDLKKFKRFIRENCPDEYDNLFKNEQKDGYAGYIAHAGKVSQLKFYQYVKKIIQDIAGAEYFLEKIAQENFLRKQRTFDNGVIPHQIHLAELQAIIHRQAAYYPFLKENQEKIEQLVTFRIPYYVGPLSKGDASTFAWLKRQSEEPIRPWNLQETVDLDQSATAFIERMTNFDTYLPSEKVLPKHSLLYEKFMVFNELTKISYTDDRGIKANFSGKEKEKIFDYLFKTRRKVKKKDIIQFYRNEYNTEIVTLSGLEEDQFNASFSTYQDLLKCGLTRAELDHPDNAEKLEDIIKILTIFEDRQRIRTQLSTFKGQFSAEVLKKLERKHYTGWGRLSKKLINGIYDKESGKTILDYLVKDDGVSKHYNRNFMQLINDSQLSFKNAIQKAQSSEHEETLSETVNELAGSPAIKKGIYQSLKIVDELVAIMGYAPKRIVVEMARENQTTSTGKRRSIQRLKIVEKAMAEIGSNLLKEQPTTNEQLRDTRLFLYYMQNGKDMYTGDELSLHRLSHYDIDHIIPQSFMKDDSLDNLVLVGSTENRGKSDDVPSKEVVKDMKAYWEKLYAAGLISQRKFQRLTKGEQGGLTLEDKAHFIQRQLVETRQITKNVAGILDQRYNAKSKEKKVQIITLKASLTSQFRSIFGLYKVREVNDYHHGQDAYLNCVVATTLLKVYPNLAPEFVYGEYPKFQTFKENKATAKAIIYTNLLRFFTEDEPRFTKDGEILWSNSYLKTIKKELNYHQMNIVKKVEVQKGGFSKESIKPKGPSNKLIPVKNGLDPQKYGGFDSPIVAYTVLFTHEKGKKPLIKQEILGITIMEKTRFEQNPILFLEEKGFLRPRVLMKLPKYTLYEFPEGRRRLLASAKEAQKGNQMVLPEHLLTLLYHAKQCLLPNQSESLAYVEQHQPEFQEILERVVDFAEVHTLAKSKVQQIVKLFEANQTADVKEIAASFIQLMQFNAMGAPSTFKFFQKDIERARYTSIKEIFDATIIYQSTTGLYETRRKVVD

SEQ ID NO: 53 - protein, 1337 aa, Bacillus cereus
MKKDYVIGLDIGTNSVGWAVMTEDYQLVKKKMPIYGNTEKKKIKKNFWGVRLFEEGHTAEDRRLKRTARRRISRRRNRLRYLQAFFEEAMTDLDENFFARLHESFLVPEDKKWHRHPIFAKLEDEVAYHETYPTIYHLRKKLADSSEQADLRLIYLALAHIVKYRGHFLIEGKLSTENTSVKEQFQQFMVIYNQTFVNGESRLVSAPLPESVLIEEELTEKASRTKKSEKVLQQFPQEKANGLFGQFLKLMVGNKADFKKVFALEEEAKITYASESYEEDLEGILAKIGDEYSDVFLAAKNVYDAVELSTILADSDKKSHAKLSSSMIVRFTEHQEDLKKFKRFIRENCPDEYDNLFKNEQKDGYAGYIAHAGKVSQLKFYQYVKKIIQDIAGAEYFLEKIAQENFLRKQRTFDNGVIPHQIHLAELQAIIHRQAAYYPFLKENQEKIEQLVTFRIPYYVGPLSKGDASTFAWLKRQNEKPIRPWNLQETVDLDQSATAFIERMTNFDTYLPSEKVLPKHSLLYEKFMVFNELTKISYTDDRGIKANFSGKEKEKIFDYLFKTRRKVKKKDIIQFYRNEYNTEIVTLSGLEEDQFNASFSTYQDLLKCGLTRAELDHPDNAEKLEDIIKILTIFEDRQRIRTQLSTFKGQFSAEVLKKLERKHYTGWGRLSKKLINGIYDKESGKTILDYLVKDDGVSKHYNRNFMQLINDSQLSFKNAIQKAQSSEHEETLSETVNELAGSPAIKKGIYQSLKIVDELVAIMGYAPKRIVVEMARENQTTSTGKRRSIQRLKIVEKAMAEIGSNLLKEQPTTNEQLRDTRLFLYYMQNGKDMYTGDELSLHRLSHYDIDHIIPQSFMKDDSLDNLVLVGSTENRGKSDDVPSKEVVKDMKAYWEKLYAAGLISQRKFQRLTKGEQGGLTLEDKAHFIQRQLVETRQITKNVAGILDQRYNAKSKEKKVQIITLKASLTSQFRSIFGLYKVREVNDYHHGQDAYLNCVVATTLLKVCPNLAPEFVYGEYPKFQTFKENKATAKAIIYTNLLRFFTEDEPRFTKDGEILWSNSYLKTIKKELNYHQMNIVKKVEVQKGGFSKESIKPKGPSNKLIPVKNGLDPQKYGGFDSPVVAYTVLFTHEKGKKPLIKQEILGITIMEKTRFEQNPILFLEEKGFLRPRVLMKLPKYTLYEFPEGRRRLLASAKEAQKGNQMVLPEHLLTLLYHAKQCLLPNQSESLAYVEQHQPEFQEILERVVDFAEVHTLAKSKVQQIVKLFEANQTADVKEIAASFIQLMQFNAMGAPSTFKFFQKDIERARYTSIKEIFDATIIYQSTTGLYETRRKVVD

SEQ ID NO: 54 - protein, 1337 aa, Enterococcus faecalis
MKKDYVIGLDIGTNSVGWAVMTEDYQLVKKKMPIYGNTEKKKIKKNFWGVRLFEEGHTAEDRRLKRTARRRISRRRNRLRYLQAFFEEAMTDLDENFFARLQESFLVPEDKKWHRHPIFAKLEDEVAYHETYPTIYHLRKKLADSSEQADLRLIYLALAHIVKYRGHFLIEGKLSTENTSVKEQFQQFMVIYNQTFVNGESRLVSAPLPESVLIEEELTEKASRTKKSEKVLQQFPQEKANGLFGQFLKLMVGNKADFKKVFGLEEEAKITYASESYEEDLEGILAKVGDEYSDVFLAAKNVYDAVELSTILADSDKKSHAKLSSSMIVRFTEHQEDLKKFKRFIRENCPDEYDNLFKNEQKDGYAGYIAHAGKVSQLKFYQYVKKIIQDIAGAEYFLEKIAQENFLRKQRTFDNGVIPHQIHLAELQAIIHRQAAYYPFLKENQEKIEQLVTFRIPYYVGPLSKGDASTFAWLKRQSEEPIRPWNLQETVDLDQSATAFIERMTNFDTYLPSEKVLPKHSLLYEKFMVFNELTKISYTDDRGIKANFSGKEKEKIFDYLFKTRRKVKKKDIIQFYRNEYNTEIVTLSGLEEDQFNASFSTYQDLLKCGLTRAELDHPDNAEKLEDIIKILTIFEDRQRIRTQLSTFKGQFSAEVLKKLERKHYTGWGRLSKKLINGIYDKESGKTILDYLVKDDGVSKHYNRNFMQLINDSQLSFKNAIQKAQSSEHEETLSETVNELAGSPAIKKGIYQSLKIVDELVAIMGYAPKRIVVEMARENQTTSTGKRRSIQRLKIVEKAMAEIGSNLLKEQPTTNEQLRDTRLFLYYMQNGKDMYTGDELSLHRLSHYDIDHIIPQSFMKDDSLDNLVLVGSTENRGKSDDVPSKKVVKKMKAYWEKLYAAGLISQRKFQRLTKGEQGGLTLEDKAHFIQRQLVETRQITKNVAGILDQRYNAKSKEKKVQIITLKASLTSQFRSIFGLYKVREVNDYHHGQDAYLNCVVATTLLKVYPNLAPEFVYGEYPKFQAFKENKATAKTIIYTNLMRFFTEDEPRFTKDSEILWSNSYLKTIKKELNYHQMNIVKKVEVQKGGFSKESIKPKGPSNKLIPVKNGLDPQKYGGFDSPVVAYTVLFTHEKGKKPLIKQEILGITIMEKTRFEQNPILFLEEKGFLRPRVLMKLPKYTLYEFPEGRRRLLASAKEAQKGNQMVLPEHLLTLLYHAKQCLLPNQSESLAYVEQHQPEFQEILERVVDFAEVHTLAKSKVQQIVKLFEANQTADVKEIAASFIQLMQFNAMGAPSTFKFFQKDIERARYTSIKEIFDATIIYQSTTGLYETRRKVVD

SEQ ID NO: 55 - protein, 1330 aa, Artificial sequence
  Cas-Locus 14
MEKEYTIGLDIGTNSVGWAVLTDDYRLVARKMSIQGDSNRKKIKKNFWGARLFEEGKTAQFRRIKRTNRRRIARRRQRVLALQDIFAEEIHKKDPNFFARLEEGDRVEADKRFAKFPVFATLSEEKNYHRQYPTIYHLRHDLANSKEQADIRLVYLAIAHCLKYRGHFLFEGELDTENTSVTENYQQFLQAYQQFFPEPIGDLDDAVPILTERLSKAKRVEKVLAYYPSEKSTGNFAQFLKLMVGNQANFKKTFDLEEEMKLNFTRDCYEEDLNELLEKTSDDYAELFLKAKGVYDAILLSQILSKSDDETKAKLSANMKLRFEEHQRDLKQLKELVRRDLPKKYDDFFKNRSKNGYAGYVKGKATQEDFYKFLRTELAGLEESQSIMEKIDLEIYLLKQRTFANGVIPHQIHLVEMREIMDRQKRFYPFLKGAQGKIEKLLTFRIPYYVGPLAQEGQSPFAWIKRKSPSQITPWNFAEVVDKENSAIEFIERMTNQDTYLPKEKVLPKQSLIYQRFMIFNELTKVSYTDERGKSHYFSSEQKRKIFNELFKQHPRVTEKQLRKFLELNEQIDSTEIKGIETSFNASYSTYHDLLKLSDQMDTLLDDPDMTTMFEEIIKILTIFEDREMIREQLKPYETVLGLPAIKKLAKKHYTGWGRLSEKMIQGMREKQSRKTILDYLIDDDDFPCNRNRNFMQLINDDHLSFKETIANELIMSDSNVLLDQVKAIPGSPAVKKGIWQSIKIVEEIIGIIGKAPKNIVIEMARENQRTSRSRPRLKALEEALKNIDSPLLKDYPTDNQALQKDRLYLYYLQNGKDMYTGEPLEIHRLSEYDIDHIIPRSFIVDNSLDNKVLVSSKVNRGKLDNAPDPLVVKRMRSHWEKLHQAKLISDKKLANLTKQNLTEADKARFIQRQLVETRQITKHVANLLHQHFNLPEEVSATEKTSIITLKSTLTSQFRQMFDIYKVREINHHHHAHDAYLNGVVAMTLLKKYPKLAPEFVYGSYIKGDINQINKATAKKEFYSNIMKFFESEEIICDEQGEVIWNKKRDLSTIKKTIGAHQVNIVKKVEKQKGGFYKETINSKANPEKLIPRKASLDPLKYGGYGSPLVAYTVIFIFEKGKQKKVTKGIEGITVMEQLRFEQDPREFLKTKGYEGVKQWLILPKYILFEAQGGYRRMIASHQETQKANSLILPENLVTLLYHARHYDEINHKVSFDYVNAHKEGFNDIFDFISDFGVRYILAPQHLEKIKVAYEKNKEVDLKEMIDAILSLLKFTLFGASVEFKFFDIKILKRYKSLTDIWEATIIYQSVTGLYERRVEVRKLWDGERL

SEQ ID NO: 56 - protein, 1150 aa, Enterococcus faecalis
MYSIGLDLGISSVGWSVIDERTGNVIDLGVRLFSAKNSEKNLERRTNRGGRRLIRRKTNRLKDAKKILAAVGFYEDKSLKNSCPYQLRVKGLTEPLSKGEIYKVTLHILKKRGISYLDEDDTEAAKESQDYKEQVRENAQLLTKYTPGQIQLQRLKENNRVKTGINAQGNYQLNVFKVSAYANELATILKTQQAFYPNELTDDWIALFVQPGIAEEAGLIYRKRPYYHGPGNEANNSPYGRWSDFKKTGQPATNIFDKLIGKDFQGELRASGLSLSAQQYNLLNDLTNLKIDGEIPLSLEQKEYILAELMTKEFTRFGVNDVVKLLGVKKERLSGWRLDKKGKPEIHTLKAYRNWRKIFAEAGIDLATLPTETIDCLAKVLTLNTEREGIENTLAFELPKLAEPVKSLVLDHYKELSQSISTQAWHRFSLKTLHLLIPELMNATSEQNTLLEQFQLKSGVRTRYSEYNKLPTKDVLAEIYNPTVNKTVSQAFKVMDALLEKYGKEQIRYITIEMPRDDNEEDEKKRIKELHAKNSQRKNDSQSYFMQKSGWSQEKFQTTIQKNRRFLAKLLYYYEQDGICAYTGLSISPELLVSDSTEIDHIIPISISLDDSINNKVLVLSKANQVKGQQTPYDAWMDGSFKKTNGKFSNWDDYQKWVESRHFSHKKENNLLETRNIFDSEQVEKFLARNLNDTRYASRLVLNTLQSFFANQGTKVRVVNGSFTHTLRKKWGADLDKTRETHHHHAVDATLCAVTPFVKVSRYHYAVKEETGEKVMREIDFETGEIVDEMSYQEFKKSKKYERKTYQVKWPNFREQLKPVNLHPRIKFSHQVDRKANRKLSDATIYSVREKTEVKTLKSGKQKITTDEYTIGKIKDIYTVDGWEAFKKKQDKLLMKDLDEKTYERLLSIAETTPDFQEVEEKNGKVKRVKRSPFAVYCEENDIPAIRKYAKKNNGPLIRSLKYYDGKLNKHINITKDSQGRPVEKTKNGRKVTLQSLKPYRYDIYQDLETKAYYTVQLYYSDLRFVEGKYGITEKEYMKKVAEQTKGQVVRFCFSLQKNDGLEIEWKDSQRYDVRFYNFQSANSINFKGLEQEMMPAENQFKQKPYNNGAINLNIAKYGKEGKKLRKFNTDILGKKHYLYYEKEPKNIIK

SEQ ID NO: 57 - protein, 1456 aa, Artificial sequence
  Cas-Locus 16
MVSHKMITFFLFIFMLYENQIAMTKNILGLDLGTNSIGWALIKQDFENKQGEILGMGSRIIPMSQDILGEFGKGNSVSQTASRTSYRGVRRLRERFLLRRERLHRVLNVLNFLPAHYASQIDFEKRFGKFKEETEPKLVYDVNEFIFKNSFEEMLYDFRKYQPQLLENDKKVPYDWTIYYLRNKALTQKIEKEELAWILLNFNQKRGYYQLRGEDFEEEKDKTFVRLKVDKIVDSGDTIKGKILYDVYFENGWKYDKQIVKTEDWIERVKEFIVTESFLKNGDIKRTFKAVDSEKDWIAIKTKTEQEIDNSNKTVGTYIYETLLRNPKQKIKGKLVRTIERKFYKDELKQILEKQKEFHLELKNDDLYSDCIRELYRNNEAHQLTLSRKDFVHLLMEDIIFYQRPLRSHKSSISNCTLEFRKYKDENGAEHIQYLKAIPKSNPYYQEFRIWQWIFNLNIYKRDDEQNPVTKKFLNTTQDFENLFEFLNNRKEIDQKALLKHLKINEKTHRWKYVEDKKYPCNETKTMISSRLDKVENISENFLTREIEQKIWHIIYSVNDKIEYEKALKSFANKNNLDEVSFFEAFKKFPPFKSEYGSFSEKAIKKLLPLMRLGKYWNYADIDKYSKDRIQKIINGEYDENIKDKVREKAVHLTTENDFQGQQLWLAQYIVYGRHSEASMIGKWNSADDLEEFLKEFKQHSLRNPIVEQVITETLRVVKDIWLKYGNGAKDFFNEIHIELGREMKLPADDRKKLTNQISENENTNLRIKALLAEMINDHSVENVRPFSPMQQEILKIYEDGVLNSGIEIEDEYLKISKTAQPSPSDLKRYKLWLEQKYKSPYTGQIIPLNKLFTPEYEIEHIIPQSRYFDDSFSNKIICESAVNKLKDNYIGLGFIKQFGGTIIELGFGKNVKVFEVEEYEDFVKKHYANNRSKRNKLLLEEIPEKMIERQLNDTRHISKYISGVLSNIVRVEDGTDEGVNSKNIVPGNGKITTQLKQDWGLNDVWNDLILPRFERMNQLTNSTDFTAWNENHQKYLPTVPIEFSKGFSKKRIDHRHHALDALVIACATKDHVNLLNNQSAKSETKRYDLKKRLMKFEKVVYNHTQTGEKIERDVPKKFLKPWENFTVEAKNSLEKIIVSFKQNLRVINKATNYYEKYVEKDGLKTKERVEQTGTNWAIRKSLHEETVSGKINLPWVETSNGEFITATRKSLDTSFNLEKIKKITDIGIQKILRNYLEAKDGNPELAFSPEGIEDLNKNVEKYNDGKSHQPIIKVRVYEKGKGRFVLGQTGNKIDKYVQGSPNLFFAIYKDDNGKKSYESIRLDIAIERLKQGLQAVPETNQNGFALYQSLSPLDLVYIPTEDEVESPHLIDFSKLDKIKLERIYNVNDFSGYTIYFSQNSFAKNIYPKEMDMTWNEKKQKPSGSFDSKTASYNKKSIKDIFIKMKIDRLGNISKA

SEQ ID NO: 58 - protein, 1462 aa, Artificial sequence
  Cas-Locus 17
MTNIEEKIFNTIMGIRNLNAFFIYILGDIQNITVMIKNKLGLDLGTNSIGWALIRQDFENKYGEILGMGSRIIPMSQDILGDFGKGNSVSQTAERTKYRSVRRLRERFLLRRERLHRLLHLLNFLPQHYASQIDFEKRFGKFKVETEPKLAWKNIEGKFSFLFQNSFNEMLEDFNANGQDLKIPYDWTIYFLRKKALSQKIEKEELAWILLNFNQKRGYYQLRGEEEEENPNKQVEFYSLKVIDVLADEPQKGKSDIWYSLILENGWIYRRSSKIPLFDWKDKTRDFIVTTDLNDDGSIKKDKDGNEKRSFRAPGENDWTLVKKKTEQEIEQSHKTVGTYIYEALLDNPKQKIKGKLIRTIERKFYKEELRQILEKQKEFHQELQSDDLYNDCIRELYRNNESHQLILSKKDFVHLLMEDLIFYQRPLRSQKSSVSNCTLEFRKYKDENGAEHIQYLKAIPKSNPYYQEFRLWQWIYNLNIYRKDDEANVTKDFLNTTQDLENLFEFLNIRKEIDQKGLLKHFKLNEKKHRWNFVEEKKYPCNETKTMISSRLDKVDNISDDFLTRDIEQKIWHIIYSVNDKVEYEKALKSFARKYHLDESSFFEAFRKFPPFKSEYGSFSEKAIKKLLALMRLGKYWNYADVDKFSKDRIQKIINGEYDENIKDKVREKAINLTSENDFQGLQLWLAQYIIYGRHSEASMIGKWNSADDLEMFLKDFKQHSLRNPIVEQVITETLRVVKDIWLKYGNGAKDFFNEIHIELGREMKLPAGDRKKLTNQITENENTNLRIKALLAEMMNDHSVENVRPFSPMQQEILKIYEDGVLNSGIEIEDEYLKISKTAQPSSSDLKRYKLWLEQKYKSPYTGQIIPLNKLFTPEYEIEHIIPQSRYFDDSFSNKVICESAVNKLKDNYIGLGFIKQFGGTIIELGFGKSVKVFNIEEYEDFVKKHYANNRGKRNKLLMEDIPGKMIERQLNDTRYISKYVSGILSNIVRVEDGSDEGVNSKNIVPGNGKITTQLKQDWGLNDVWNDIILPRFERMNQLTNSKDFTAWNENHQKFLPTVPIEFSKGFSKKRIDHRHHALDALVIACATKDHVNLLNNQSAKSDTKRYDLKKKLMKFEKVVYYHTQTGEKIEREIPKQFLKPWENFTVDAKHNLESIIVSFKQNLRVINKATNYYEKYVEKDGTKNKERVEQTGTNWAIRKPMHKDTVSGKVDLPWVKVPKGKILTATRKSLDISFDLKSIASITDTGIQKILRNYLKFKGSPELAFSPEGIEDLNKNIEKYNDGKSHQPINKVRVFELGSKFQVGQTGNKKDKYVEAAKGTNLFFAVYENENRNRSYETIPLNEVIERQKQGLSVVDLKGTIDFFLCPNDLVYIPSEDELENSSNIDFKNFKEEQNKKIYKVVSFSGSQLFFIRQEIAISIVNKAEFSTLNKMERSIDGLMIKENCIKLKVDRLGNISKA

SEQ ID NO: 59 - protein, 1440 aa, Artificial sequence
  Cas-Locus 18
MKNILGLDLGTNSIGWALVKQDFENKQGEILGMGTRIIPMSQDILGDFGKGNSVSQTAERTKYRSVRRLRERFLLRRERLHRVLNILNSLPEHYASQIDFEKRFGKFKVETEPKLAWKNIEGHFSFLFQNSFNEMLEDFKTNGQDLKIPYDWTIYYLRKKALSQKIEKEELAWILLNFNQKRGYYQLRGEEEEENPNKIVEFYSLKVVDVLADEPQKSKSDIWYSLVLENGWIYRRASKISLFDWKDKTRDFIVTTDLNDDGSVKTDKDGNEKRSFRAPGENDWTLVKKKTEQEIEQSHKTVGIYIYETLLNNPKQKIKGKLVRTIERKFYKEELRQILEKQKQFHQELQNDDLYNCCIRELYRNNEAHQLTLSKKDFVHLFMEDIVFYQRPLRSQKSSISNCTLEFRKYKDENGAEHTQYLKAIPKSNPYYQEFRLWQWIFNLNLYKKDNDENVIKEFLTTTQDIENLFEFLNNRKEIDQKALLKHFKLNEKTHRWNFVEDKKYPCNETKTMISTRLEKVENISDDFLTREIEQQIWHIIYSVNDKIEYEKALKTFASKHHLDESSFFEAFRKFPPFKSEYGSYSEKAIKKLLPIMRLGKYWDYANIDQSSKDRIKKIINGEYDENIKDKVREKAVHLTNENDFQGLQLWLAQYIVYGRHSEASITAKWNSADDLEEFLKDFKHHSLRNPIVEQVITETLRVVKDIWLKYGKGAKDFFNEIHIELGREMKLPAEDRKKLTSQIIENENTNLRIKALLAEMMNDHAVENVRPFSPQQQEILKIYEDGVLNSGIEIEDEYLKISKTAQPSPSDLKRYKLWLEQKYKSPYTGQMIPLNKLFTPEYEIEHIIPQSRYFDDSFSNKIICESAVNKLKDNYIGLGFIKQFGGTIIELGLGKSVKVFDIDQYEDFVKKHYANNRSKRNKLLLEDIPEKMIERQINDTRYISKYISGILSNIVRLEDGSDEGVNSKNIVPGNGKITTQLKKDWGLNDVWNDLILPRFKRMNQLTNSTDFTAWNENFQKFLPTVPIEYSKGFSKKRIDHRHHALDALVIACATKDHVNLLNNQSAKSETKRYDLKKKLMKFERVVYFHTQTGEKIEREVPKQFLKPWKNFTVDAMHNLETVIVSFKQNLRVINKATNYYEKYVEKDGVRNKTRIKQKGINWAIRKPMHKDTVSGKVDLPWVKVPKGKILTATRKSLDASFDLKSIGSITDTGIQKILKNYLMHKDGNTELAFSPEGIEDLNKSIEKYNDGKPHQPINKVRVFELGSKFQVGQAGNKKDKYVEAAKGTNLFFGVYEDKNGKRSYETIPLNEVIERQKQGLPVVDLRSTNDFYLCPNDLVYILSDDERGNMTNIDFESLSDEQVKRIYKFVSCTGGEGHFIPYANATEIIKNENGTNSKSERMQNFYDGSCMFDKNAKPIMIKENCVKLKVDRLGNIAKI

SEQ ID NO: 60 - protein, 1440 aa, Artificial sequence
  Cas-Locus 19
MKNILGLDLGTNSIGWALVKQDFENKQGEILGMGVRIIPMSQDILGDFGKGNSVSQTAERTKYRSVRRLRERFLLRRERLHRVLNILNFLPEHYASQIDFEKRFGKFKVETEPKLAWKNIEGQFSFLFQNSFNEMLEDFKANGQDLRIPYDWTIYYLRKKALYQKIEKEELAWILLNFNQKRGYYQLRGEEEEENPNKLVEFYSLKVVDVLADEPQKSKSDIWYSLVLENGWIYRRASKILLFDWKDKTRDFIVTTDLNDDGSVKTDKEGNEKRSFRAPGENDWTLVKKKTEQKIEQSHKTVGMYIYETLLANPKQKIKGKLVRTIERKFYKEELRQILEKQKEFHQELQNDDLYNDCIRELYRNNEAHQLTLSKKDFIHLFIKDIVFYQRPLRSQKSSIFNCTLEFRKYKDENGAEHTQYLKAIPKSNPYYQEFRLWQWIFNLNLYKKDNDENVIKEFLTTTQDVENLFEFLNNRKEVDQKTLLKHFKLNEKTHRWNFVEDKKYPCNETKTMISTRLQKVENISGDFLTREIEQKIWHIIYSVNDKIEYEKALKSFALKHQLDKSSFFEAFRKFPPFKSEYGSFSEKAIKKLLPLMRLGKYWDYANIDKFSKDRIQKIINGEYDENIKDRVREKAVHLRSEDDFQGLQLWLAQYIVYGRHSEASITGKWNSADDLEEFLKDFKHHLLRNPIVEQVITETLRVVKDIWLKYGKGAKDFFNEIHIELGREMKLPADDRKKLTNQITENENTNLRIKALLTEMMNDHAVENVRPFSPQQQEILKIYEDGVLNSGIEIEDEYLKISKTAQPFPSDLKRYKLWLEQKYKSPYTGQIIPLNKLFTPEYEIEHIIPQSRYFDDSFSNKIICESAVNKLKDNYIGLGFIKQFGGTIIELGFGKSVKVFDIDEYEDFVKKHYANNRSKRNKLLLEDIPEKMIERQINDTRYISKYISGILSNIVRLEDGSDEGVNSKNIVPGNGKITTQLKKDWGLNDVWNDLILPRFKRMNQLTNSTDFTAWNENFQKFLPTVPIEYSKGFSKKRIDHRHHALDALVIACATKDHVNLLNNQSAKSETKRYDLKKKLMKFERVVYLHMQTGEKIEREVPKQFLKPWENFTVDVKYNLDMVIVSFKQNLRVINKATNYYEKYVEKDGARNKTRVEQKGINWAIRKPMHKDTVSGKVDLPWVKVPKGKILTATRKSLDASFDLKSIASITDTGIQKILKNYLMLKDGNPELAFSPEGIEDLNKSIEKYNDGKPHQPINKVRVFELGSKFQIGQAGNKKDKYVEAAKGTNLFFAVYEDENGKRSYETIPLNEVIERQKHGLPVVDLTSTNDFYLCPNDLVYILSDDERDNMTNNDFENLSDEQVKRIYKFVSCTGGEGHFIPYASATEIIKNENGTNSKSERIQNFYDGSCMLDKNSKPIMIKENCVKLKVDRLGNISKI

SEQ ID NO: 61 - protein, 1440 aa, Artificial sequence
  Cas-Locus 20
MKNILGLDLGTNSIGWALVKQDFENKQGEILGMGARIIPMSQDILGDFGKGNSVSQTAERTKYRSVRRLRERFLLRRERLHRVLNILNFLPEHYASQIDFEKRFGKFKVETEPKLAWKNIEGQFSFLFQNSFNEMLEDFKANGQDLRIPYDWTIYYLRKKALYQKIEKEELAWILLNFNQKRGYYQLRGEEEEENPNKLVEFYSLKVVDVLADEPQKSKSDIWYSLVLENGWIYRRASKILLFDWKDKTRDFIVTTDLNDDGSVKTDKEGNEKRSFRAPGENDWTLVKKKTEQEIEQSHKTVGMYIYETLLANPKQKIKGKLVRTIERKFYKEELRQILEKQKEFHQELQNDDLYNDCIRELYRNNEAHQLTLSKKDFIHLFIKDIVFYQRPLRSQKSSISNCTLEFRKYKDENRAEHTQYLKAIPKSNPYYQEFRLWQWIFNLNLYKKDNDENVIKEFLTTTQDVENLFEFLNNRKEVDQKTLLKHFKLNEKTHRWNFVEDKKYPCNETKTMISTRLQKVENISGDFLTREIEQKIWHIIYSVNDKIEYEKALKSFALKHQLDKSSFFEAFRKFPPFKSEYGSFSEKAIKKLLPLMRLGKYWDYANIDKFSKDRIQKIINGEYDENIKDRVREKAVHLRSEDDFQGLQLWLAQYIVYGRHSEASITGKWNSADDLEEFLKDFKHHLLRNPIVEQVITETLRVVKDIWLKYGKGAKDFFNEIHIELGREMKLPADDRKKLTNQITENENTNLRIKALLTEMMNDHAVENVRPFSPQQQEILKIYEDGVLNSGIEIEDEYLKISKTAQPSPSDLKRYKLWLEQKYKSPYTGQIIPLNKLFTPEYEIEHIIPQSRYFDDSFSNKIICESAVNKLKDNYIGLGFIKQFGGTIIELGFGKSVKVFDIDEYEDFVKKHYANNRSKRNKLLLEDIPEKMIERQINDTRYISKYISGILSNIVRLEDGSDEGVNSKNIVPGNGKITTQLKKDWGLNDVWNDLILPRFKRMNQLTNSTDFTAWNENFQKFLPTVPIEYSKGFSKKRIDHRHHALDALVIACATKDHVNLLNNQSAKSETKRYDLKKKLMKFERVVYLHVQTGEKIEREVPKQFLKPWENFTVDVKHNLDTVIVSFKQNLRVINKATNYYEKYVEKDGARNKTRVEQKGINWAIRKPMHKDTVSGKVDLPWVKVPKGKILTATRKSLDASFDLKSIASITDTGIQKIIKNYLMLKDGNPELAFSPEGIEDLNKSIEKYNDGKPHQPINKVRVFELGSKFQIGQAGNKKDKYVEAAKGTNLFFAVYEDENGKRSYETIPLNEVIERQKHGLPVVDLTSTNDFYLCPNDLVYILSDDERDNMTNNDFESLSDEQVKRIYKFVSCTGGEGHFIPYASATEIIKNENGTNSKSERMQNFYDGSCMLDKNSKPIMIKENCVKLKVDRLGNISKI

SEQ ID NO: 62 - protein, 1233 aa, Artificial sequence
  Cas-Locus 21
MGSRIIPLSTSDKEEFQRGLSITKNQSRTVSRTQRKGYDRKQLKKSNLKKILNKYNIFLSEELLKLPMLDLWKLRSDSANPNENISTEQLGRILYMLNQKRGYKSARSEANADKKDTDYVQAVKGRYAQLKERNQTIGQYFHEELHNANANNSYFRIKEEVYPREAYIEEFDTIINAQKDKHDFLTDEVVHQLRNEIIYFQRKLKSQKGLINICEFEGFEKTVFDKDKNKHKVVSVGPKVAPKTSPLFQLCRIWEVVNTITLKIKNPEGSKYKWGEKIPNLIEKEILADYLLKNESLSFTKLLEILELNKNDIYVNKQILKGIKGNETYAVLQNILGDNELLNFDVSIIPSNYTSILVDKKTGEILEERAGLELDASLEKEPLYQLWHTIYSLKDLDECKNALIKRFGFDDEIAEKLSRINFNKQAFSNKSNKSMRKILPFLMEGYDYSQSCSLAGYNHSNSLTKDEREQQVTLNRLELLQKNSLRQPIVEKILNQMINVVNAILEQYGKPTEIRVELARDLKQSKDERNDADLQNSKNKKLNEEIGKRLAELGLPATKRYIQKYKFIFPSLSKNLKDARVNNQCIYCGETFNLTEALSGDAFDVDHIVPKALLFDDSQTNKVLVHRKCNSTKTNQTAYDYIATKGDEQVRIYSERIDDWFKRGIISYSKMQRLKVSHKEYLERKKIGKETETDKKLWENFIDRQLRDTQYISRKSREILQKVCNNVTTTEGGVTAKLRNLWGWDDVLMNLQMPKYKELGQTVIKEWTSDHGKRKHQKEEIENWTKRDDHRHHAIDALVIACTRQGFIQRINTLNSSDTKDLMMKEVEKAKIEFNEKSTLLEKYLKTQKPFTTEQVMKEADKILVSFKAGKKVATITKFKATGKNKDTGVIVPRGALHEQNVYGKIKAIEKDKSLKYLFENSGKIVNPKIKNLVEIRLSENENSSKMALSTLKKNPIFLNEEKTDLLEKASCYEYVTVRKYPLNTIKASQADDIVDERVKFLVKERLAQFGNKEKEAFKDTLWFNEEKQIPIITVRLFARPDANNLQAMKKDENGKEIGFVVLGNNHHIAIYEDKDNKLVQHSCTFWHAVERKKYNIPPVIKNSSEIWNQLLNKEFPETFLDKLPADNLELKFSMQQNEMFILGLPQEEFEEAIKNNDKSVLSKHMYLVWSIADGDYWFRHHLETKNTELKKINGAKESKRFFRLQSLKAVENLTPIKVRLNHLGEITKIGEY

SEQ ID NO: 63 - protein, 1268 aa, Artificial sequence
  Cas-Locus 22
MMIKNILGLDLGTNSIGWALIEVDENNIPIRIVAMGSRIIPLSTSDKEEFQRGLSITKNQSRTVSRTQRKGYNRKQLKKNDLKKILNKYNIFPSEELLKLPMLDLWKLRSDSANPNENISAEQLGRILYMLNQKRGYKSARSEANADKKDTDYVQEVKGRYAQLKEREQTIGQYFYEGLSTAFSDKDNRQYFRIKEEVYPREAYVEEFDTIINAQKDKHDFLTDKVVHQLRNEIIYFQRKLKSQKGLVSICEFEGFEKTVFDKEKNKNKVVFIGPKVAPKTSPLFQLCRIWEVVNTITLKIKNPEGSKYKWGEKIPDLKEKEILADYLFKNESVSFSKLLEILGLKKENVYVNKQILKGIKGNETYAALYNVLGDNELLNFNVSIITSNHTAILIDKKTGEILEERAGLELDAFLEKEPLYQLWHTIYSLKDLDECKNALIKRFGFEEDIAEKLSCIDFNKQAFGNKSNKSMRKILPFLMEGYDYSQSCSLAGYNHSNSLTKDEREQQITLDRLELLSKNSLRQPIVEKILNQMINVVNAILEQYGKPSEIRVELARQLKQSKDERNETDLQNSKNKKLNEEIGKRLAELGLPVTKRYIQKYKFIFPSLSKNLKDAHVNNQCIYCGETFNLTEALSGDAYDVDHIVPKTLLFDDSQTNKVLVHRKCNSTKTNQTAYDYIATKGDEQVRVYSERVDDWFKRGIISYSKMQRLKVSHKEYLERKKLGKETETDKKLWENFIDRQLRDTQYISRKSREILQKVCNNVTTTEGGVTAKLRNVWGWDDVLMNLQLPKYKELGQTFTKEWTSKHGKRKHQKEEIENWTKRDDHRHHAIDALIIACTKQGFIQRINTLNSSETKDLMVKEVEGAKIEFNEKATLLEKYLKTQKPFDTHEVMKEADKILISFKAGKKVATITKFKATGKNKETGVIVPRGALHEQSVYGKIKVIENDKPLKYLFENSDKIVNPKIKNLVETRLTENENNFKKALSTLKKNPIFFNEEKTEILEKASCYNDATVLKYKLQNIKASQADDIVDERVKSLVKERLAQFGNKEKEAFKDILWLNEEKQIPIITVRLFARPDADNLQAIKKDKYGNEIGFVVTGNNHHIAIYEDKDNKLVQHTCTFWHAIERKKYNIPAVIGNSSDIWNQLLDKELPISFLNKLPMDKLNLKFSVQQNEMFILGLSQDEFDETIKNNDKSLLSKYLYLVWSIAEGDYWFRHHLETKNTELKKTDGAKESKRYYRLSSKGFIDLNPIKVRLNHLGEITKIGE

SEQ ID NO: 64 - protein, 1264 aa, Artificial sequence
  Cas-Locus 23
MKKILGLDLGTNSIGWALIEIDKNNIPISIIAMGSRIIPLSSSDKEEFQRGLSITKNQSRTVSRTQRKGYDRKQLKKSDLKKILNKYNIFPSEELLKLPMLDLWKLRSDSANPNEDISAEQLGRILYMLNQKRGYKSARSEANADKKDTDYVQAVKGRYAHLKDRTQTIGQYFFEELDNANTNNSYFRIKEEVYPREAYTEEFDAIINAQKGKHDFLTDEVVHQLRNEIIYFQRKLKSQKGLVSICEFEGFEKTIFDKEKDKNKVVLVGPKVAPKTSPLFQLCRIWEVVNTITLKIKNPEGSKYKWGEKIPNLKEKEILADYLFKNESLSFSKLLEILELKKENVYVNKQILKGLKGNETYSTIHSILGDNELLNFDVSIITSNHTSMLVDKKTGEILEERAGLELDASLEREPLYQLWHTIYSLKDLDECKNALIKRFGFDDEIAKKLSRIDFNKQAFGNKSNKSMRKILPFLMEGYDYSQSCSLAGYNHSNSLTKDEREQLITLDQLALLPKNSLRQPIVEKILNQMINVVNAILEQYGKPSEIRVELARELKQSKDERNDTDLQNSKNKKLNEEIRKRLVELGLPVTKRYIQKYKFIFPSLSKNLKDAHVNNQCIYCGETFNLTEALSGDAYDVDHIVPKALLFDDSQTNKVLVHRKCNSTKDKLTAYDYISTKGIEQVRVYSERVDDWFKRGIISYSKMQRLKVSHEEYLERKKIGKETETDKKLWENFIERQLRDTQYISRKAREILHKLCNNVTTTEGGVTAKLRNLWGWDDVLMNLQMPKYKELGQTVIKEWASDHGKRKHQKEEVENWTKRDDHRHHAIDALVIACTKQGYIQRINTLNSSDTRDLMIKEVEEAKIEFNEKSTLLEKYLKTQEPFTTQEVMKEADKILISFKAGKKVATITKYKATGKNKNTGVLVPRGALHEQNVYGKIKVIEKDKSLKYLFENSDKIVNSSIKKLIEVRLLDNENNSKLALSSLKKNPIFLNEEKKEVLEKASCYEYVTVKKYPLNTIKANQADDIVDERVKFLVKERLSQFGNKEKEAFKDTLWFNEEKQIPIITVRLFARPDANNLQAIKKDKNGKEIGFVVTGNNHHIAIYEDKDNKLIQHSCTFWHAVERKKYNVPTVIKNSSDVWNQLLHKELPESFLNKLPADYLNLKFSMQQNEMFILGLSQEEFDQAIKKNNKPLLSKHLYLVWSITDGDYFFRHHLETKNTELKKTDGAKEGKRYFRLSTKGLTDLNPIKVRLNHLGEITKIGEY

SEQ ID NO: 65 - protein, 1464 aa, Artificial sequence
  Cas-Locus 24
MAKILGLDLGTNSIGWAIVDKDGNDFSLVDKGVRIFSEGVKSEKGIESSRAAERTGYRSARKIKYRRKLRKYETLKVLSSNGMCPLSVEEVEDWKKSGFKKYPLNPEFLKWLRTDEYQHINPYYFRDRASKQKVALFELGRALYHIAQRRGFLSNRLDQSAEGVFEEHNPQIQSLIEDLDDSKLILDELKNYYVDKGIIEEAEKGVFKKDLDEGEKKLKSLYNSLVGIIKKNENNVEKCKEEFIARLNKKEDLGKVKGKIKDISQAMLDGNFKTLGQYFFSLYNKGKIRNQYTSREEHYLEEFITICKIQGIEGIDDKEKLPEKKFTGLAKDLYKAIFFQRPLKSQKGLIGKCSFEKSKSRCAVSHPDFEEYRMWTYLNTIKIGTQSEKTLRFLTQDEKLKLVPKFYRKNDFNFEVLAKELVEKGASFGFYKSSKKNDFFYWFNYKPTDSVAACQVSASLKNVIGEDWKTKIFTYKTLNAKEEEVTKSVDYKDLWHLLSVATSDIYLEEYAKDKLGFDDKNAKAFSKIKLKKDFASLSSSAITKILPYVKEGLLYSHAVFMANIENIVDENIWNNLDQRNYIQSKIAEIIEGYTFEKTGLEVVNSLIKEYKTENDYSKKVYYSKEAEPEFEKDLKQKLVVFYKSNDIEDENIKQAIFNDLYSVLIDQLKKYEYIKIQRLDEKVLEFLKGENEDGEVFCNNPKQLKKLYHPSDIEIFKKQKVKDKDGKETGQLILGSPLTSSIKNPMAMRALHQLRKVLNTLILEGQVDESTRIHIEMARELNDANRRKGIQDYQKENKDFRDNAIKEIKKLYLDECGKEVEPTEDDILRYQLWIEQDKCEIYEQGKNISICDIIGSNPAYDIEHTIPRSISQDNSQMNKTLCSQRFNRDVKKQKMPIELSNHLEILPRIAHWKEEADNLSREIEIISRSIKAASTKEIKDKKIRRRHYLTLKRDYLQGKYDRFIWKEPKVGFKNSQIPDTGIITKYAQAYLKSYFKRVESVKGGMVAEFRKQWGIQESFIDENGFKQYKEKDRSKHTHHTIDAITIACMTKDKYDVLAKAWTSEDEQDKLKAKALMADAKPWKTFKEDLLKIEDEILVSHYTPDNVKKQSKKIIRVRGKKQFIAEIERDVKGKAIQKKDANGKVVYKLNDKGEKIPRLQQGDTIRGSLHQDSIYGAIKNPLNTDEIRYVIRKDLESLKASDIENIVDETVKEKVKQAVTNKVLLLSSNAQQKNKIAENEKVWMNKEKQISINKVRIYANSVKNPLEIKEHSLLSKSRHEHKQRVYGQNDENYAMALYELDGKREFELINNFNLAKLIKNGQGFYPLNKEKELKGKKVLYPIAKSNSRDVVLKRGQQVVFFDKEVEKPKDISEILDFKRRVYIIEGLSIQRIKSGNNEFEYGVIMLRYFKEARKSDEIKKDNFKPDGVFKLGENKPTRKMNHSQFTAFVEGIDFKVLPSGKFVKI

SEQ ID NO: 66 - protein, 1458 aa, Artificial sequence
  Cas-Locus 25
MAKILGLDLGTNSIGWAIVDKDENNFSLVDKGVRIFSEGVKSEKGIESSRAAERTGFRSARKIKYRRKLRKYETLKVLSSNGMCPLSIEEVEDWKKSGFKQYPLNPEFLKWLRTDEAENINPYFFRDKASKQKVPLFELGRAFYHIAQRRGFLSNRLDQSAEGILEEHCPKIETIVEDLNSYEEVLENLKDYFFFETGILDANEKSGYAKDLDEGDKKLVSLYKSLHTIVKKNDTNFEKGKAEIIERLNKKDVLGKVKGKIKDISQAMVDGSFKTLGQYFFSLYSKEKIRNQYTSREEHYLEEFITICKVQGIDSINEKEQLPEKKSDGLAKDLYKAIFFQRPLKSQKGLIGKCSFEKSKSRCSVSHPDFEEYRMWNYINTIKIGTQSEKTLRFLTQEEKLKLVPKFYRKNDFNFEVLAKELIEKGTSFGFYKSSKKNDYFYWFNFKPTDSVSACQVSASLKNIIGEDWKTKTFTYQTLNVKKEEVTKTVDYKDLWHLLSVATSDIYLNKYAKDKLGFEDKNAKAFSKIKLKKDFGNLSLSAITKILPYIKEGLLYSHAVFMANIENIVDEEIWKDEHQRKYIQTQIAEIVENYTFEKSQLEVINGLIKDSKLKEEYYSKEAESIYKKDLATKLVLFFKYNVIENESDQKIIFENLFPIFIEQLKKYEFIKIQRLDEKVLEFLKGENQDGEIFCSNPKQLKKLYHPSDIEVFKKKIIKDEFGNEKVVLGTPLTSAIKNPMAMRALHQLRKVLNTLILEGLVDENTLIHIEMARELNDANKRKGIQDYQNENKKFREDAIKEIKKLYLDECKKEVEPTEDDILRYQLWIEQNRQEIYEQGKNISICDIIGSNPAYDIEHTIPRSRSQDNSQMNKTLCSQRFNREIKGNKMPIELNNHLEILPRIAHWKEEASNLSREIEIISRSIKAAATKEVKDKKIRRRHYLTLKRDYLQGKYDRFILEEPRVGFKNSQIPDTGIITKYSQAYLKSYFKRVESVKGGMVAEFRKQWGIQESFIDENGFKHYKIKDRSKHTHHTIDAITIACMTKDKYDVLAHAWALEDEQNKKEAKAIIEKAKPWKTFKEDLLKIEEEILVSHYTPDNVKKQSKKVIRIRGKKQHVAEIERDEKGKAIPKKDANGKILYKLDKEGKKLPRYQQGDAIRGSLHQDSIYGAIKNPLNTEEIRYVIRKDLESLKASDIENIVDETVKEKIKEAVANKVLLFSSNAQQKNKIRENEKVWMNEEKQVPINKVRIYANSVKNPLEVKEHSLLSKSRHEHKQKVYGQNDENYCMAIYELEGKREFELINNFNLAKLIKGGQGFYPFYKEKEVKGKVVQVPIAKRNGRDLILKRGQQVIFYDKDVENPDDVFDLVDLKGRIYIIEGLSIQRQVVSGKLYEFGSIMFRYFKEARKADEIKKDSFKPDGTFKSGEIKPTRKMNHNQFTAFVEGIDFKVLPSGKFIKI

SEQ ID NO: 67 - protein, 1127 aa, Artificial sequence
  Cas-Locus 26
MAKILGLDLGTNSIGWALIDDKLNKILGIGSRIFPMGVENLGDGDNEMSKNASRTGARGVRRQFFRRRLRKKVLLKSLSENNMCPINTKDFEDWKQTKQFPNEKLATWFAMNPYELRQKALTEKLSLEEIGRIFYHLIQRRGFLSNSRKGGSDDGAIFKGNAKEGKIGIDYTLESIEGKTLGSYLYEIYPKENQPFQYGLERIRNRYTTRRMYIDEFEMIWNKQSEFHSVLNYDLKTILGGRKQDNYTEDGILFYQRPLRSQKHLVGNCSFEPLKTKCPISAIPVEMFRIWQWVNTVEYNGKKISEEEKTKLVEQLLSFDKIEFKKLRKAIGKESAEFKFNYKDDDKIAGTHTISNLSNRKFFGKRWFDFSDKEQEDIWHVLYFFDSKSNLKEYAVKNWNFSEEQAIAISRFNVKDGYASLSRKAIGNILPFLQQGYTYDIAVVMGGIKNAFGDKWQNDTVENKLKQLDLIDNIEGIVRSKISGGFIDTIKDLLRKEFEFNDKQLKKLYHHSAAIDTVALLRKLPTGKQADKDIQAIRNPIVITALFELRKLVNELIEEHGQLDEIKVEMARDLKISKSQRNKIRKDQKRLERENDRVKKEVEKYVRVSHDNILRFKLWEECKQTCPYTGVVIPVTKLFTGEIQIEHIHPWSRSLNDSFNNKTLCYADENRRKGDKTPFEFYGSDELDWIARKERALKLFSDTKEYPNAYQKFKRFVQQKFDDDFSSRQLNDTRFISKEASSYLKQICEKVNVSPGQMTANLRQKWGLNTVLNDENAKTREDHRHHAIDALVMACGKTSYLQELSKWNRYNRNYDLKDFPMPWETFRFDAEKAIDKILISHKRISNDITTRYTKVEKNGKTYINKGVAARGQLHKETVFGKRNFNGDEAFHVRKSIDSLTTEKQLEKVVDEVIKKLIHKKIKELGGFVKGTIPANTFFNVDENGVKQPQIFLPNKNGSPVPILKVRMKENISGAEKLKDNVNQWVNPRNNHHVLIYKDEKGILREEVVTFWTVVERKSKGFPVYQLPVEGKEIVTALHINDMFLLGLNEEEINWENPDYEILRDSLYRVQSLSSKYYEFRQSINAESQNKISPIYEQIRGFGSGKTGWDSFNPIKVKISVSGKISKI

SEQ ID NO: 68 - protein, 1108 aa, Artificial sequence
  Cas-Locus 27
MAYKLGIDLGTASIGAVAIRIENNEPQSIDWHAVRIYSEPVVNTPKGLQPKKAARRDARQLRKQIERRARRLRRIANLIPLLGLHKAEVKPGRRQDLTTLRAIAARQQVELNEFALVLLRLAKRRGYAGGFRDSKDGVVKSSSDKLSEEMRRLAETQNLQEITLGEYLLYRQEHGLPVWLKAERPGLEPRYALREMVTAEFEQLWTTQARYHPILASNHLGKPLKQWFNEALFYQRPLKSPAHMVGNCLLEPNLPRAPRAHMAAQHFRIDKTLHDMRWGSGRRAERLSKAQLNVLRQMLNDPANADGKVSFKHLYQALSETGLSDPRSRTLNLERSSCDQLSGNNTVARWRALGLYDQWLTLAPRDQTTIINLLADLGGPELLVPDDWHQNIRKSSAKAGDTNLYRRFRPEVVDFINALRECKDNNGQPVFNRLTSMKFEGGRSSYSVKALEKLNTWFNDPWWPDEGSGAERGDEIDEDAALRVCYPHLFTQPQELLQRLEAAPTTGNDVVDGALRELRKVINQCIDALGERPEEIVVEMAREIGKGVVWRKEQENRIRQNELARRKIASELEKHGLSANNTRILRYQLWEEQDLHWCPYCAHPINLEAATSGMTHIEHVLPRSLTQIGRKRSELVLAHAGCNNLKADQTPWQAFGHDVERWSAVERAAARFQELGKKSYAKDRIKAMGFYRKAELLLLKDYESEVLSDESIADFADRQLHQTSWIAKAAAQWLRTITPLVSVSRGEFTALLRHQWRLDTVIAEARLDEKLPVLDIDACPVSPEAFQQFRKQWEGHPPDNLAERTERKLEKRLDHRHHGIDALVIALTSRSLYMSLARRYVEESERRARGERVRHDWSIEPTMHNLRNQALGMVRTCNLTHKPDRNPAGRLFKDTAYGVHFPEEGDRVQLTLRKPLTSLADEKSAEKTRKNLHSIASSEVRLLVLKAFEARLSVGQNPKQALSEPVPYPAYGTAIWRVRCMQGYADDAVRIVHKSRQGEHEKHLLNDGYACLEITAGENGKHQVRLVTQREAQGRGFMDNRQQAKRIFKGDTVIDRRDDRKYLVGYFKAEGYIFLLPHTDTRNFDKIKEADSGKKKVSFNQAYQLERI

SEQ ID NO: 69 - protein, 1108 aa, Artificial sequence
  Cas-Locus 28
MAYKLGIDLGTASIGAVAIRIENKVPISVDWHAVRIFSEPVVNTQKGLTPKKTARREARQLRKQVERRARRLRRIANLIPLLGLQKAEVKLGRRQDLTTLRAIAAREKVELHEFALVLLRIAKRRGYAGGFRDSEGGVVKTASDKLSVEMRALAETRGLQQITLGEYLLHRQQRGLPIWLKAERPGLEPLYALREMVTAEFEQIWTIQAKCHPILNSCHLEKPLKQWFYQALFYQRPLKSPAHMVGNCLLEPNLPRAPRAQMAAQRFRIEKTLHDLRWGGGRQAERLNTAQLDLLRQTLSDPTNVDSKVSFKRLYQALNEAGLNDPRNRTLNLERSSRDQLLGNSTVARWRALGLQDQWLMLAPRDQTSVINLLADLGGPEILTPDDWHQNIRKSSAKDDNTKAYRRFRQEVIDFIDALRRCIDSNGQPVFNRLSAMKFDGGRSSYSVKALEKMNEWFNNPWWPNEGPGSERRGEIDEEVAIRVCYPHLYTQSQELHPRLEAAPTTGNDVVDGALRELRKVINQCIDEQGEKPQEIIIELAREVGKGVALRNEQESRIRNNELARRKIASELEGHGLIASSTRILRYQLWEEQERHWCPYCALPISLEAAISNMTHIEHVLPRSLTQVGRKRSELVLAHAGCNHLKADQTPWQAFGHDAERWSAVERAAARFQELGKKCYFKDRAKAMGCFRKSALLMLKDYESEVLNDESIAGFANRQLHQTSWIAKVAAQWLRTISPLISVSRGEFTALLRHQWRLDTVIAETRYGEKLPVLDIDGNPVHPEEFQHFRKQWEGHPPDNPAERTERKLEKRFDHRHHGIDALVIALTSRSLYMSLARRYVEESKKRARGEKVRRDWSIEPPMHNLRGQALDMIRACNLTLKPDRNAAGRLFEDYAYGVHFSDASERAQLTRRKTLIDLADEKSAEKTRKNLQSIASPEVRQIVVEALQMRLSAGQNPKQALSKPVLYPAYGTEIWRVRCLQGYADHAVRIVHNSRQGEHEKCLLNDGYACLEIRAGENGKHQARLVTQREAQGRDFMETQQQAKRLFKGDTVIDRRDDRKYRVGYFTAEGNIFLIPFEDTRNFDKINERNSGKKKVSFNQAHRLERV

SEQ ID NO: 70 - DNA, 36 bp, Bacillus cereus
atcatatcatatcgagttttagtaaggaactatagc

SEQ ID NO: 71 - DNA, 36 bp, Brevibacillus laterosporus
atcatatcatatcgagttttggtaaggaactatagc

SEQ ID NO: 72 - DNA, 36 bp, Artificial sequence
  CRISPR repeat consensus Locus 8
atcataatacagcaatggctttaatggaactatgac

SEQ ID NO: 73 - DNA, 36 bp, Bacillus cereus
atcatagcatagcgatgtttcttttggaactatagc

SEQ ID NO: 74 - DNA, 36 bp, Lactobacillus fermentum
gtcttggatgagtgtcagatcagtagttccgagtac

SEQ ID NO: 75 - DNA, 36 bp, Enterococcus faecalis
gttttagagtcatgttgtttagaatggtaccaaaac

SEQ ID NO: 76 - DNA, 36 bp, Bacillus cereus; identical to SEQ ID NO: 75

SEQ ID NO: 77 - DNA, 36 bp, Enterococcus faecalis; identical to SEQ ID NO: 75

SEQ ID NO: 78 - DNA, 36 bp, Artificial sequence
  CRISPR repeat consensus Locus 14
gttttagagctatgttgaattgaatgcttccaaaac

SEQ ID NO: 79 - DNA, 36 bp, Enterococcus faecalis
gtttttgtactctcaataatttcttatcagtaaaac

SEQ ID NO: 80 - DNA, 47 bp, Artificial sequence
  CRISPR repeat consensus Locus 16
gttgtgctgtatctcaaagatacggataaatgaaagcaattcacaac

SEQ ID NO: 81 - DNA, 47 bp, Artificial sequence
  CRISPR repeat consensus Locus 17
gttgtgactaatcacgaagataataaattttgaaagcaattcacaac

SEQ ID NO: 82 - DNA, 47 bp, Artificial sequence
  CRISPR repeat consensus Locus 18
gctgtgactaatcacgaagataataatttttgaaagcaattcacaac

SEQ ID NO: 83 - DNA, 47 bp, Artificial sequence; identical to SEQ ID NO: 82
  CRISPR repeat consensus Locus 19

SEQ ID NO: 84 - DNA, 47 bp, Artificial sequence; identical to SEQ ID NO: 82
  CRISPR repeat consensus Locus 20

SEQ ID NO: 85 - DNA, 47 bp, Artificial sequence
  CRISPR repeat consensus Locus 21
gttgtgttatatctcaaagatactcaaaaatgaaagcaattcacaac

SEQ ID NO: 86 - DNA, 47 bp, Artificial sequence; identical to SEQ ID NO: 82
  CRISPR repeat consensus Locus 22

SEQ ID NO: 87 - DNA, 46 bp, Artificial sequence
  CRISPR repeat consensus Locus 23
gttgggaatcataagtaaaaatacaattttgaaagcaattcacaac

SEQ ID NO: 88 - DNA, 36 bp, Artificial sequence
  CRISPR repeat consensus Locus 24
gttgtggtttgattaaagattagaaaacacgatatt

SEQ ID NO: 89 - DNA, 36 bp, Artificial sequence
  CRISPR repeat consensus Locus 25
gttgtggtttgattaaagattagaaaacacgatatc

SEQ ID NO: 90 - DNA, 36 bp, Artificial sequence; identical to SEQ ID NO: 88
  CRISPR repeat consensus Locus 26

SEQ ID NO: 91 - DNA, 36 bp, Artificial sequence
  CRISPR repeat consensus Locus 27
aggttatcagtcattccgatggtggggtatcggaac

SEQ ID NO: 92 - DNA, 36 bp, Artificial sequence; identical to SEQ ID NO: 91
  CRISPR repeat consensus Locus 28

SEQ ID NO: 93 - DNA, 36 bp, Bacillus cereus
atcatatcatatcaagttttggtaagttgctatagt

SEQ ID NO: 94 - DNA, 36 bp, Brevibacillus laterosporus; identical to SEQ ID NO: 93

SEQ ID NO: 95 - DNA, 36 bp, Artificial Sequence
  anti repeat Locus 8
atcatggtacagcaatggctttgatgtttctatgat

SEQ ID NO: 96 - DNA, 36 bp, Bacillus cereus
atcatatcatagcgatgtttcttaagttattatagt

SEQ ID NO: 97 - DNA, 38 bp, Lactobacillus fermentum
atcttgactatgagtgttagatcagtagtctcgaatgt

SEQ ID NO: 98 - DNA, 38 bp, Enterococcus faecalis
attttaacttgctatgttgtttagaatagtcccaaaag

SEQ ID NO: 99 - DNA, 38 bp, Bacillus cereus; identical to SEQ ID NO: 98

SEQ ID NO: 100 - DNA, 38 bp, Enterococcus faecalis; identical to SEQ ID NO: 98

SEQ ID NO: 101 - DNA, 38 bp, Artificial Sequence
  anti repeat Locus 14
attttaacttgctatattgaattgaatgctaccaatgg

SEQ ID NO: 102 - DNA, 38 bp, Enterococcus faecalis
attttactgataagaaattattgagaatctacaaaaat

SEQ ID NO: 103 - DNA, 47 bp, Artificial sequence
  anti repeat Locus 16
attgtgaattgctttcggttacaaatctaaaaattatttttttaact

SEQ ID NO: 104 - DNA, 47 bp, Artificial sequence
  anti repeat Locus 17
attgtgaattgctttcaaaatttatatgacaaatatagaagaaaaaa

SEQ ID NO: 105 - DNA, 47 bp, Artificial sequence
  anti repeat Locus 18
attgtgaattgctttcaaaattattgatacaaatataaaagaaaaaa

SEQ ID NO: 106 - DNA, 47 bp, Artificial sequence; identical to SEQ ID NO: 105
  anti repeat Locus 19

SEQ ID NO: 107 - DNA, 47 bp, Artificial sequence; identical to SEQ ID NO: 105
  anti repeat Locus 20

SEQ ID NO: 108 - DNA, 47 bp, Artificial sequence
  anti repeat Locus 21
attgtgaattgctttcggatacaaatctaaaaataatatttttaatc

SEQ ID NO: 109 - DNA, 47 bp, Artificial sequence
  anti repeat Locus 22
attgtgaattgcttttcaaaattattaatacaaatatagaagaaaaa

SEQ ID NO: 110 - DNA, 45 bp, Artificial sequence
  anti repeat Locus 23
attgtgaattgcttcaaaattgtattgcaataatacaataaaata

SEQ ID NO: 111 - DNA, 36 bp, Artificial sequence
  anti repeat Locus 24
attgtgataagattaaagattagaaattttaatcag

SEQ ID NO: 112 - DNA, 36 bp, Artificial sequence; identical to SEQ ID NO: 111
  anti repeat Locus 25

SEQ ID NO: 113 - DNA, 36 bp, Artificial sequence; identical to SEQ ID NO: 111
  anti repeat Locus 26

SEQ ID NO: 114 - DNA, 39 bp, Artificial sequence
  anti repeat Locus 27
gttgccgatagtccccaccatcggaatgactgatacgct

SEQ ID NO: 115 - DNA, 39 bp, Artificial sequence
  anti repeat Locus 28
gttgccgatagtccccaccatcggaataactgatacgct

SEQ ID NO: 116 - RNA, 16 nt, Bacillus cereus
gcuauaguuccuuacu

SEQ ID NO: 117 - RNA, 16 nt, Brevibacillus laterosporus
gcuauaguuccuuacc

SEQ ID NO: 118 - RNA, 19 nt, Artificial sequence
  sgRNA repeat region for Cas-Locus 8
gucauaguuccauuaaagc

SEQ ID NO: 119 - RNA, 20 nt, Bacillus cereus
gcuauaguuccaaaagaaac

SEQ ID NO: 120 - RNA, 21 nt, Lactobacillus fermentum
gucuuggaugagugucagauc

SEQ ID NO: 121 - RNA, 17 nt, Enterococcus faecalis
guuuuagagucauguug

SEQ ID NO: 122 - RNA, 17 nt, Bacillus cereus
guuuuagagucauguug

SEQ ID NO: 123 - RNA, 17 nt, Enterococcus faecalis
guuuuagagucauguug

SEQ ID NO: 124 - RNA, 17 nt, Artificial sequence
  sgRNA repeat region for Cas-Locus 14
guuuuagagcuauguug

SEQ ID NO: 125 - RNA, 16 nt, Enterococcus faecalis
guuuuuguacucucaa

SEQ ID NO: 126 - RNA, 22 nt, Artificial sequence
  sgRNA repeat region for Cas-Locus 16
guugugaauugcuuucauuuau

SEQ ID NO: 127 - RNA, 25 nt, Artificial sequence
  sgRNA repeat region for Cas-Locus 17
guugugaauugcuuucaaaauuuau

SEQ ID NO: 128 - RNA, 26 nt, Artificial sequence
  sgRNA repeat region for Cas-Locus 18
guugugaauugcuuucaaaaauuauu

SEQ ID NO: 129 - RNA, 26 nt, Artificial sequence
  sgRNA repeat region for Cas-Locus 19
guugugaauugcuuucaaaaauuauu

SEQ ID NO: 130 - RNA, 26 nt, Unknown
  sgRNA repeat region for Cas-Locus 20
guugugaauugcuuucaaaaauuauu

SEQ ID NO: 131 - RNA, 26 nt, Artificial sequence
  sgRNA repeat region for Cas-Locus 21
guugugaauugcuuucauuuuugagu

SEQ ID NO: 132 - RNA, 23 nt, Artificial sequence
  sgRNA repeat region for Cas-Locus 22
guugugaauugcuuucaaaaauu

SEQ ID NO: 133 - RNA, 22 nt, Artificial sequence
  sgRNA repeat region for Cas-Locus 23
guugugaauugcuuucaaaauu

SEQ ID NO: 134 - RNA, 16 nt, Artificial sequence
  sgRNA repeat region for Cas-Locus 24
guugugguuugauuaa

SEQ ID NO: 135 - RNA, 16 nt, Artificial sequence
  sgRNA repeat region for Cas-Locus 25
guugugguuugauuaa

SEQ ID NO: 136 - RNA, 16 nt, Artificial sequence
  sgRNA repeat region for Cas-Locus 26
guugugguuugauuaa

SEQ ID NO: 137 - RNA, 15 nt, Artificial sequence
  sgRNA repeat region for Cas-Locus 27
guuccgauaccccac

SEQ ID NO: 138 - RNA, 15 nt, Artificial sequence
  sgRNA repeat region for Cas-Locus 28
guuccgauaccccac

SEQ ID NO: 139 - RNA, 16 nt, Bacillus cereus
gguaaguugcuauagu

SEQ ID NO: 140 - RNA, 16 nt, Brevibacillus laterosporus
gguaaguugcuauagu

SEQ ID NO: 141 - RNA, 19 nt, Artificial sequence
  sgRNA anti-repeat region for Cas-Locus 8
gcuuugauguuucuaugau

SEQ ID NO: 142 - RNA, 20 nt, Bacillus cereus
guuucuuaaguuauuauagu

SEQ ID NO: 143 - RNA, 23 nt, Lactobacillus fermentum
gaucuaacacucauagucaagau

SEQ ID NO: 144 - RNA, 19 nt, Enterococcus faecalis
caacauagcaaguuaaaau

SEQ ID NO: 145 - RNA, 19 nt, Bacillus cereus
caacauagcaaguuaaaau

SEQ ID NO: 146 - RNA, 19 nt, Enterococcus faecalis
caacauagcaaguuaaaau

SEQ ID NO: 147 - RNA, 19 nt, Artificial sequence
  sgRNA anti-repeat region for Cas-Locus 14
caauauagcaaguuaaaau

SEQ ID NO: 148 - RNA, 18 nt, Enterococcus faecalis
uugagaaucuacaaaaau

SEQ ID NO: 149 - RNA, 22 nt, Artificial sequence
  sgRNA anti-repeat region for Cas-Locus 16
guaaccgaaagcaauucacaau

SEQ ID NO: 150 - RNA, 25 nt, Artificial Sequence
  sgRNA anti-repeat region for Cas-Locus 17
auaaauuuugaaagcaauucacaau

SEQ ID NO: 151 - RNA, 25 nt, Artificial sequence
  sgRNA anti-repeat region for Cas-Locus 18
aauaauuuugaaagcaauucacaau

SEQ ID NO: 152 - RNA, 25 nt, Artificial sequence
  sgRNA anti-repeat region for Cas-Locus 19
aauaauuuugaaagcaauucacaau

SEQ ID NO: 153 - RNA, 25 nt, Unknown
  sgRNA anti-repeat region for Cas-Locus 20
aauaauuuugaaagcaauucacaau

SEQ ID NO: 154 - RNA, 26 nt, Artificial sequence
  sgRNA anti-repeat region for Cas-Locus 21
auuuguauccgaaagcaauucacaau

SEQ ID NO: 155 - RNA, 23 nt, Artificial sequence
  sgRNA anti-repeat region for Cas-Locus 22
aauuuugaaaagcaauucacaau

SEQ ID NO: 156 - RNA, 21 nt, Artificial sequence
  sgRNA anti-repeat region for Cas-Locus 23
aauuuugaagcaauucacaau

SEQ ID NO: 157 - RNA, 16 nt, Artificial sequence
  sgRNA anti-repeat region for Cas-Locus 24
uuaaucuuaucacaau

SEQ ID NO: 158 - RNA, 16 nt, Artificial sequence
  sgRNA anti-repeat region for Cas-Locus 25
uuaaucuuaucacaau

SEQ ID NO: 159 - RNA, 16 nt, Artificial sequence
  sgRNA anti-repeat region for Cas-Locus 26
uuaaucuuaucacaau

SEQ ID NO: 160 - RNA, 18 nt, Artificial sequence
  sgRNA anti-repeat region for Cas-Locus 27
guggggacuaucggcaac

SEQ ID NO: 161 - RNA, 18 nt, Artificial sequence
  sgRNA anti-repeat region for Cas-Locus 28
guggggacuaucggcaac

SEQ ID NO: 162 - RNA, 118 nt, Bacillus cereus
aagggcaacagacccgaggcguuggggaucgccuagcccguuuuuacgggcucucccuauauucaaaauaaugacaaacgagcaccuuggagaauuuauuuccgaggugcuuuuuuuu

SEQ ID NO: 163 - RNA, 118 nt, Brevibacillus laterosporus
aagggcaacagacccgaggcguuggggaucgccuagcccguucuuacgggcucuccccacaaucaaaauaaugacaaacgagcaccucggagcauuuauuuccgaggugcuuuuuuuu

SEQ ID NO: 164 - RNA, 114 nt, Artificial sequence
  sgRNA 3 prime tracrRNA for Cas-Locus 8
aagggcuuuggcccguggcguaggggaucgccugcccauuuuaaugggcuucuccccaucuauuuaaugagaguuuuacaaccuuggcuauucuuaaauagcuaagguuuuuuu

SEQ ID NO: 165 - RNA, 100 nt, Bacillus cereus
aagggcaaugacccguggcguuuggggaucgccuuauccuguauggauauucuccccauguuaaaagcaccuacgcauaacgcuauggugcuuuuauuuu

SEQ ID NO: 166 - RNA, 99 nt, Lactobacillus fermentum
caaacgagugguuuuccacgaguuauuacuuuugagccauguuauucuggccauacauauaauaaaaaggagucgauuuaaucggcuccuuuuuacuuu

SEQ ID NO: 167 - RNA, 53 nt, Enterococcus faecalis
aagguuuuaaccguaaucaacuguaaaguggcgcuguuucggcgcuuuuuuuu

SEQ ID NO: 168 - RNA, 53 nt, Bacillus cereus
aagguuuuaaccguaaucaacuguaaaguggcgcuguuucggcgcuuuuuuug

SEQ ID NO: 169 - RNA, 56 nt, Enterococcus faecalis
aagguuucaaccguaaucaacuguaaaguggcgcuguuucggcgcuuuuuuuguuu

SEQ ID NO: 170 - RNA, 55 nt, Artificial sequence
  sgRNA 3 prime tracrRNA for Cas-Locus 14
aaggcuuuguccgucaucagcuucuaggagcaagcgcugucucggcgcuuuuuuu

SEQ ID NO: 171 - RNA, 49 nt, Enterococcus faecalis
aaggcauuuugccgaauuuaccgcccuacauauguagggcgguuuuuuu

SEQ ID NO: 172 - RNA, 51 nt, Artificial sequence
  sgRNA 3 prime tracrRNA for Cas-Locus 16
aaggauuauuccguugugaaaacauucaaggcgggguaacucgccuuuucc

SEQ ID NO: 173 - RNA, 51 nt, Artificial sequence
  sgRNA 3 prime tracrRNA for Cas-Locus 17
aaggauuauuccguugugaaaacauucaaggcggggcaacucgccuuuuuu

SEQ ID NO: 174 - RNA, 59 nt, Artificial sequence
  sgRNA 3 prime tracrRNA for Cas-Locus 18
aaggauuauuccguugugaaaacauuuagcgccucgacuaccuucggggcauuuuuauu

SEQ ID NO: 175 - RNA, 60 nt, Artificial sequence
  sgRNA 3 prime tracrRNA for Cas-Locus 19
aaggauuauuccguugugaaaacauuuagcgccucgacuaccuucggggcauuuuuauua

SEQ ID NO: 176 - RNA, 60 nt, Unknown
  sgRNA 3 prime tracrRNA for Cas-Locus 20
aaggauuauuccguugugaaaacauuuagagccucgacuaccuucggggcauuuuuauuu

SEQ ID NO: 177 - RNA, 60 nt, Artificial sequence
  sgRNA 3 prime tracrRNA for Cas-Locus 21
aaggauuauuccguugugaaaacauuuagcgccucgccuaucugcggggcauuuuuauuu

SEQ ID NO: 178 - RNA, 57 nt, Artificial sequence
  sgRNA 3 prime tracrRNA for Cas-Locus 22
aaggauuauuccguugugaaaacauucaaggcggggcaacucgucuuuuuucuuuuu

SEQ ID NO: 179 - RNA, 52 nt, Artificial sequence
  sgRNA 3 prime tracrRNA for Cas-Locus 23
aaggauuauuccguugugaaaacauuuaaggcggggagacucgccuuuuucu

SEQ ID NO: 180 - RNA, 55 nt, Artificial sequence
  sgRNA 3 prime tracrRNA for Cas-Locus 24
aaggcuauaugccguagaugaaaaucuuuaguccugcuucggugggacuuuucau

SEQ ID NO: 181 - RNA, 55 nt, Artificial sequence
  sgRNA 3 prime tracrRNA for Cas-Locus 25
aaggcuacaugccguagaugaaaaucuuuaguccugcuucggugggacuuuuuuu

SEQ ID NO: 182 - RNA, 55 nt, Artificial sequence
  sgRNA 3 prime tracrRNA for Cas-Locus 26
aaggcuauaugccguagauaaaaaucuuuaguccugcuucggugggacuuuuuuu

SEQ ID NO: 183 - RNA, 66 nt, Artificial sequence
  sgRNA 3 prime tracrRNA for Cas-Locus 27
aaggcuaaguaccucgguacgaagccaaccgauacaaacggucaucucggugaccguuuuucuuuu

SEQ ID NO: 184 - RNA, 66 nt, Artificial sequence
  sgRNA 3 prime tracrRNA for Cas-Locus 28
aaggcugaguacuucgguacgaagccaaccgauacaaacggccaccucgguggccguuuuuguuuu

SEQ ID NO: 185 - RNA, 174 nt, Artificial Sequence
  sgRNA for Cas-Locus 6
  misc_feature (1)..(20): n is a, c, g, or u
nnnnnnnnnnnnnnnnnnnngcuauaguuccuuacugaaagguaaguugcuauaguaagggcaacagacccgaggcguuggggaucgccuagcccguuuuuacgggcucucccuauauucaaaauaaugacaaacgagcaccuuggagaauuuauuuccgaggugcuuuuuuuu

SEQ ID NO: 186 - RNA, 174 nt, Artificial Sequence
  sgRNA for Cas-Locus 7
  misc_feature (1)..(20): n is a, c, g, or u
nnnnnnnnnnnnnnnnnnnngcuauaguuccuuaccgaaagguaaguugcuauaguaagggcaacagacccgaggcguuggggaucgccuagcccguucuuacgggcucuccccacaaucaaaauaaugacaaacgagcaccucggagcauuuauuuccgaggugcuuuuuuuu

SEQ ID NO: 187 - RNA, 176 nt, Artificial Sequence
  sgRNA for Cas-Locus 8
  misc_feature (1)..(20): n is a, c, g, or u
nnnnnnnnnnnnnnnnnnnngucauaguuccauuaaagcgaaagcuuugauguuucuaugauaagggcuuuggcccguggcguaggggaucgccugcccauuuuaaugggcuucuccccaucuauuuaaugagaguuuuacaaccuuggcuauucuuaaauagcuaagguuuuuuu

SEQ ID NO: 188 - RNA, 164 nt, Artificial Sequence
  sgRNA for Cas-Locus 9
  misc_feature (1)..(20): n is a, c, g, or u
nnnnnnnnnnnnnnnnnnnngcuauaguuccaaaagaaacgaaaguuucuuaaguuauuauaguaagggcaaugacccguggcguuuggggaucgccuuauccuguauggauauucuccccauguuaaaagcaccuacgcauaacgcuauggugcuuuuauuuu

SEQ ID NO: 189 - RNA, 167 nt, Artificial Sequence
  sgRNA for Cas-Locus 10
  misc_feature (1)..(20): n is a, c, g, or u
nnnnnnnnnnnnnnnnnnnngucuuggaugagugucagaucgaaagaucuaacacucauagucaagaucaaacgagugguuuuccacgaguuauuacuuuugagccauguuauucuggccauacauauaauaaaaaggagucgauuuaaucggcuccuuuuuacuuu

SEQ ID NO: 190 - RNA, 113 nt, Artificial Sequence
  sgRNA for Cas-Locus 11
  misc_feature (1)..(20): n is a, c, g, or u
nnnnnnnnnnnnnnnnnnnnguuuuagagucauguuggaaacaacauagcaaguuaaaauaagguuuuaaccguaaucaacuguaaaguggcgcuguuucggcgcuuuuuuuu

SEQ ID NO: 191 - RNA, 113 nt, Artificial Sequence
  sgRNA for Cas-Locus 12
  misc_feature (1)..(20): n is a, c, g, or u
nnnnnnnnnnnnnnnnnnnnguuuuagagucauguuggaaacaacauagcaaguuaaaauaagguuuuaaccguaaucaacuguaaaguggcgcuguuucggcgcuuuuuuug

SEQ ID NO: 192 - RNA, 116 nt, Artificial Sequence
  sgRNA for Cas-Locus 13
  misc_feature (1)..(20): n is a, c, g, or u
nnnnnnnnnnnnnnnnnnnnguuuuagagucauguuggaaacaacauagcaaguuaaaauaagguuucaaccguaaucaacuguaaaguggcgcuguuucggcgcuuuuuuuguuu

SEQ ID NO: 193 - RNA, 115 nt, Artificial Sequence
  sgRNA for Cas-Locus 14
  misc_feature (1)..(20): n is a, c, g, or u
nnnnnnnnnnnnnnnnnnnnguuuuagagcuauguuggaaacaauauagcaaguuaaaauaaggcuuuguccgucaucagcuucuaggagcaagcgcugucucggcgcuuuuuuu

SEQ ID NO: 194 - RNA, 107 nt, Artificial Sequence
  sgRNA for Cas-Locus 15
  misc_feature (1)..(20): n is a, c, g, or u
nnnnnnnnnnnnnnnnnnnnguuuuuguacucucaagaaauugagaaucuacaaaaauaaggcauuuugccgaauuuaccgcccuacauauguagggcgguuuuuuu

SEQ ID NO: 195 - RNA, 119 nt, Artificial Sequence
  sgRNA for Cas-Locus 16
  misc_feature (1)..(20): n is a, c, g, or u
nnnnnnnnnnnnnnnnnnnnguugugaauugcuuucauuuaugaaaguaaccgaaagcaauucacaauaaggauuauuccguugugaaaacauucaaggcgggguaacucgccuuuucc

SEQ ID NO: 196 - RNA, 125 nt, Artificial Sequence
  sgRNA for Cas-Locus 17
  misc_feature (1)..(20): n is a, c, g, or u
nnnnnnnnnnnnnnnnnnnnguugugaauugcuuucaaaauuuaugaaaauaaauuuugaaagcaauucacaauaaggauuauuccguugugaaaacauucaaggcggggcaacucgccuuuuuu

SEQ ID NO: 197 - RNA, 134 nt, Artificial Sequence
  sgRNA for Cas-Locus 18
  misc_feature (1)..(20): n is a, c, g, or u
nnnnnnnnnnnnnnnnnnnnguugugaauugcuuucaaaaauuauugaaaaauaauuuugaaagcaauucacaauaaggauuauuccguugugaaaacauuuagcgccucgacuaccuucggggcauuuuuauu

SEQ ID NO: 198 - RNA, 135 nt, Artificial Sequence
  sgRNA for Cas-Locus 19
  misc_feature (1)..(20): n is a, c, g, or u
nnnnnnnnnnnnnnnnnnnnguugugaauugcuuucaaaaauuauugaaaaauaauuuugaaagcaauucacaauaaggauuauuccguugugaaaacauuuagcgccucgacuaccuucggggcauuuuuauua

SEQ ID NO: 199 - RNA, 135 nt, Artificial Sequence
  sgRNA for Cas-Locus 20
  misc_feature (1)..(20): n is a, c, g, or u
nnnnnnnnnnnnnnnnnnnnguugugaauugcuuucaaaaauuauugaaaaauaauuuugaaagcaauucacaauaaggauuauuccguugugaaaacauuuagagccucgacuaccuucggggcauuuuuauuu

SEQ ID NO: 200 - RNA, 136 nt, Artificial Sequence
  sgRNA for Cas-Locus 21
  misc_feature (1)..(20): n is a, c, g, or u
nnnnnnnnnnnnnnnnnnnnguugugaauugcuuucauuuuugagugaaaauuuguauccgaaagcaauucacaauaaggauuauuccguugugaaaacauuuagcgccucgccuaucugcggggcauuuuuauuu

SEQ ID NO: 201 - RNA, 127 nt, Artificial Sequence
  sgRNA for Cas-Locus 22
  misc_feature (1)..(20): n is a, c, g, or u
nnnnnnnnnnnnnnnnnnnnguugugaauugcuuucaaaaauugaaaaauuuugaaaagcaauucacaauaaggauuauuccguugugaaaacauucaaggcggggcaacucgucuuuuuucuuuuu

SEQ ID NO: 202 - RNA, 119 nt, Artificial Sequence
  sgRNA for Cas-Locus 23
  misc_feature (1)..(20): n is a, c, g, or u
nnnnnnnnnnnnnnnnnnnnguugugaauugcuuucaaaauugaaaaauuuugaagcaauucacaauaaggauuauuccguugugaaaacauuuaaggcggggagacucgccuuuuucu

SEQ ID NO: 203 - RNA, 111 nt, Artificial Sequence
  sgRNA for Cas-Locus 24
  misc_feature (1)..(20): n is a, c, g, or u
nnnnnnnnnnnnnnnnnnnnguugugguuugauuaagaaauuaaucuuaucacaauaaggcuauaugccguagaugaaaaucuuuaguccugcuucggugggacuuuucau

SEQ ID NO: 204 - RNA, 111 nt, Artificial Sequence
  sgRNA for Cas-Locus 25
  misc_feature (1)..(20): n is a, c, g, or u
nnnnnnnnnnnnnnnnnnnnguugugguuugauuaagaaauuaaucuuaucacaauaaggcuacaugccguagaugaaaaucuuuaguccugcuucggugggacuuuuuuu

SEQ ID NO: 205 - RNA, 111 nt, Artificial Sequence
  sgRNA for Cas-Locus 26
  misc_feature (1)..(20): n is a, c, g, or u
nnnnnnnnnnnnnnnnnnnnguugugguuugauuaagaaauuaaucuuaucacaauaaggcuauaugccguagauaaaaaucuuuaguccugcuucggugggacuuuuuuu

SEQ ID NO: 206 - RNA, 123 nt, Artificial Sequence
  sgRNA for Cas-Locus 27
  misc_feature (1)..(20): n is a, c, g, or u
nnnnnnnnnnnnnnnnnnnnguuccgauaccccacgaaaguggggacuaucggcaacaaggcuaaguaccucgguacgaagccaaccgauacaaacggucaucucggugaccguuuuucuuuu

SEQ ID NO: 207 - RNA, 123 nt, Artificial Sequence
  sgRNA for Cas-Locus 28
  misc_feature (1)..(20): n is a, c, g, or u
nnnnnnnnnnnnnnnnnnnnguuccgauaccccacgaaaguggggacuaucggcaacaaggcugaguacuucgguacgaagccaaccgauacaaacggccaccucgguggccguuuuuguuuu

1. A synthetic composition comprising a target sequence and a single guide RNA capable of forming a guide RNA/Cas9 endonuclease complex, wherein said guide RNA/Cas9 endonuclease complex can recognize, bind to, and optionally nick or cleave the target sequence, wherein said single guide RNA comprises SEQ ID NO: 188, a functional fragment of SEQ ID NO: 188, or a functional variant of SEQ ID NO: 188.

2. A synthetic composition comprising a target sequence and a single guide RNA capable of forming a guide RNA/Cas9 endonuclease complex, wherein said guide RNA/Cas9 endonuclease complex can recognize, bind to, and optionally nick or cleave the target sequence, wherein said single guide RNA comprises a chimeric non-naturally occurring crRNA linked to a tracrRNA, wherein said tracrRNA comprises SEQ ID NO: 142 or 165, a functional fragment of SEQ ID NO: 142 or165, or a functional variant of SEQ ID NO: 142 or 165.

3. A synthetic composition comprising a target sequence and a single guide RNA capable of forming a guide RNA/Cas9 endonuclease complex, wherein said guide RNA/Cas9 endonuclease complex can recognize, bind to, and optionally nick or cleave the target sequence, wherein said single guide RNA comprises a chimeric non-naturally occurring crRNA linked to a tracrRNA, wherein said chimeric non-naturally occurring crRNA comprises SEQ ID NO: 119, a functional fragment of SEQ ID NO: 119, or a functional variant of SEQ ID NO: 119.

4. A synthetic composition comprising a target sequence and a guide RNA capable of forming a guide RNA/Cas9 endonuclease complex, wherein said guide RNA/Cas9 endonuclease complex can recognize, bind to, and optionally nick or cleave the target sequence, wherein said guide RNA is a duplex molecule comprising a chimeric non-naturally occurring crRNA and a tracrRNA, wherein said chimeric non-naturally occurring crRNA comprises a variable targeting domain capable of hybridizing to said target sequence, wherein said tracrRNA comprises SEQ ID NO: 142 or 165, a functional fragment of SEQ ID NO: 142 or165, or a functional variant of SEQ ID NO: 142 or 165; wherein said chimeric non-naturally occurring crRNA comprises a variable targeting domain capable of hybridizing to said target sequence.

5. A synthetic composition comprising a target sequence and a guide RNA capable of forming a guide RNA/Cas9 endonuclease complex, wherein said guide RNA/Cas9 endonuclease complex can recognize, bind to, and optionally nick or cleave the target sequence, wherein said guide RNA is a duplex molecule comprising a chimeric non-naturally occurring crRNA and a tracrRNA, wherein said chimeric non-naturally occurring crRNA comprises SEQ ID NO: 119, a functional fragment of SEQ ID NO: 119, or a functional variant of SEQ ID NO: 119; wherein said chimeric non-naturally occurring crRNA comprises a variable targeting domain capable of hybridizing to said target sequence.

6. A synthetic composition comprising a target sequence and a guide RNA/Cas9 endonuclease complex comprising a Cas9 endonuclease comprising SEQ ID NO: 50, a functional fragment of SEQ ID NO: 50, or a functional variant of SEQ ID NO: 50; and at least one guide RNA, wherein said guide RNA/Cas9 endonuclease complex is capable of recognizing, binding to, and optionally nicking or cleaving all or part of the target sequence.

7. A synthetic composition comprising a target sequence and a guide RNA/Cas9 endonuclease complex comprising at least one guide RNA and a Cas9 endonuclease, wherein said Cas9 endonuclease is encoded by a DNA sequence comprising SEQ ID NO: 27, a functional fragment of SEQ ID NO: 27, or a functional variant SEQ ID NO: 27, wherein said guide RNA/Cas9 endonuclease complex is capable of recognizing, binding to, and optionally nicking or cleaving all or part of the target sequence.

8. The synthetic composition of any of claims 6-7 wherein the guide RNA comprises a sequence selected from the group consisting of: SEQ ID NOs: 119, 142, 165, and 188.

9. The synthetic composition of any of claims 1-7, wherein said target sequence is located in the genome of a cell.

10. A method for modifying a target site in the genome of a cell, the method comprising introducing into said cell at least one guide RNA and at least one Cas9 endonuclease comprising SEQ ID NO: 50, a functional fragment of SEQ ID NO: 50, or a functional variant of SEQ ID NO: 50; wherein said guide RNA and Cas9 endonuclease can form a complex that is capable of recognizing, binding to, and optionally nicking or cleaving all or part of said target site; further comprising identifying at least one cell that has a modification at said target, wherein the modification at said target site is selected from the group consisting of (i) a replacement of at least one nucleotide, (ii) a deletion of at least one nucleotide, (iii) an insertion of at least one nucleotide, and (iv) any combination of (i)-(iii).

11. (canceled)

12. The method of claim 10, further comprising introducing into said cell a polynucleotide modification template, wherein said polynucleotide modification template comprises at least one nucleotide modification of said nucleotide sequence.

13. The method of claim 10, further comprising introducing into said cell at least one donor DNA, wherein said donor DNA comprises a polynucleotide of interest.

14. The method of claim 13, further comprising identifying at least one cell that has said polynucleotide of interest integrated in or near said target site.

15. The method of claim 10, wherein the cell is selected from the group consisting of a human, non-human, animal, bacterial, fungal, insect, yeast, non-conventional yeast, and plant cell.

16. The method of claim 15, wherein the plant cell is selected from the group consisting of a monocot and a dicot cell.

17. The method of claim 16, wherein the plant cell is selected from the group consisting of maize, rice, sorghum, rye, barley, wheat, millet, oats, sugarcane, turfgrass, or switchgrass, soybean, canola, alfalfa, sunflower, cotton, tobacco, peanut, potato, Arabidopsis, and safflower cell.

18. (canceled)

19. (canceled)
